United States Patent Application Publication US 2025/0205292 A1 - sequence listing, part 17

SEQ ID NO: 28 - DNA, 2178027 bp, Bifidobacterium pseudocatenulatum
  source 1..2178027: mol_type = genomic DNA
gtggccgacacgacaactgaccctctcgagcaggctcggggagtctggtccgacgcgctggcgttgttgcaccagaatccggcgctgtccatccgagataaaagctggctggaaaacgtttttcccgaaggcatgtggggtcctaccattgtcttatgcgtgccaagcgcggccgcacagcagacgttgcagaacgaattgaaccagcccctgctggaagccttgcgggaagccgccgaacaggatattttccccgcattcaagattgtggaaaagaaggaaccggcccaacctgccgtcgaggaatacccccacttctcccccgcgccacatgcggaggaaaccacgcaggggcagctgccgattccggttgttatgccgccggagcgccacaacaacttccaacgcggccaaaacaggcctttgctggatcctaagacccatttgaataagaacgccacgttcgacaccttcgttcctggcgattccaatcgtttcgcacgtaccgtcgcgttggccgtcgcggaaggttccggtcacgatttcaacccgctttgtatttacggcggatcaggattgggtaaaacccacttgctgaacgccatcggcaattacgcactggtcaaggatcccacgctgaaagtccgttatgtgaccagtgaggaattcaccaacgaattcatcgaagcgttgggtgacaccaaccagaattccggtcaaatcaaggaattcaaccgtcgctaccgcgaagtcgacgtgctgctcatcgacgatattcaatttctgagcggcaaggacgcgacgcttgaacagttcttccatacattcaataccctgcatcaggcgaacaagcgcattgtgatcgcatccgatgtgcctccgaaggatctgcagggattcaacgaacgtttgatctcccgtttcgaatccggcctgaccgttgacgtcaagccgccggatctggagacgcgcatcgccattctgcgcatgatcgcccacggcaccaacgttcaggacgatgtgctcaacctcatcgcggagcggttcaccgagaatattcgcgagctggaaggcgcgctgaaccgcgtgaccgccatggcatcgctgagcggccagccggtgacccgcgcgttggcggaacagacgttgcaggactttttctcgaccgatgtggagatcaagcccaccgacatcatcacccaggtggccaagtacttctacattacgttcgatgacattgtcggacgttcacgtacgaagaagatcgcgctggcgcgtcagatcgccatgtatttggtgcgtgagctcaccagcatgagcctgaacgacatcggccaggtgtttggcggcaaggaccacaccacggtgatgcatgcatacacccgcatcagcgacgagatgcaggaaaagcaggagatctacaactacgtgacggaactgaccctgcagctcaagcagcgttccggcgaaaaataacgttttctatgcgactttgcgcgtttgcatgtgttttcgtgcgtctcaaaaaaacgattttaggcgttttctgcctttctcaggcgattttcacaagccacgtatgagtatcagtaaattctttatcagctgttttaccgaccatcctgacacgccggcctgtggaagatttttattgaagttatccacatggttatacacaaatcaatgatttctcggtggaaaacccgttggaaacgccagaatcgccggtggatgaattgtgaactatccacatggttttgtggataactttttcaaagcgacgaggctgtggataacccgatgatttgtccacacttcgtccaaaagttatccacaagcaatgagatgttgcgagccattgcaaaacgtggggtctgagcacttacccacattatccacaggccttattatgacgaatgtaggttgttataagaaattcatcatcgtcgtcataagtggggaattccccacgcttcgtcaaacgccgacagtctcgctagaatgacttatggaccgaacgaaacgaggaaactagccatgaaagttgaagtcaattcccaagcgctggcagacgcagtagcctggaccactcgcgtgatcgacgctcgtcctgcatcccccattttggcaggcattcgcttggaggccatcgacggcaccctccagctttccgccttcaattacgccatttccgcacgccaccatatcgaagcaggcgttgatgaaagcggatccattctggtgctcggcaagctgctggcagatatcaccaagtcgcttcccgccgcgaaaacctacctgtccactgacggatccacactgaccatcacgtcgggcaagtccaccttcaccatgcagctcatgccggataacgaatatccggatctgccggtggttcccgccaaactggggcaggtggacgcccaaaccttcgcacaggccgtcgcccaggcgtccgtcgccgtttcccgcgaggagaaccgtccggtactgaccggcattcgtgtgcagttccaaggcaacaaggtgatcatgagctccaccgaccgattccgcttgtcgcgttcgagcttcacctggacgccggaaaacccggacatcaacaccaccgcactcgtgcgcggcgcactgttgcgcgatgtggcccgttccttggacgagcatcaaaacatcgtcgtggatttcgatccggagaatccgtcgctgctgggctttgagaacgccggacgcgtatccacctcgcagctgatcgacggcgaattccccgcggtggaccgcctgtacgctgacgaatacccgattcatgcggtcatcaacaagcaggatctcatcagcgccatcaagcgcgtgtccctcgtggccgaacgcaacgctccgatccgcatggccttcaccagccaggaactcacgctgaccgcaggctcggtggatgaagcccaagccaaggagatcctcgacatcgacatggatggcgaagacatcaccgtggccttcaatcccgcctacctgatcgaaggcctgagcgccatcagcgagccgttcgtacgcatgaagatgaccaccgcggtcaagccggtggaattcaacggccagcaggaatcgaattccgaagaatccatggactaccgctacctgctcgtgccgatgcgcttcaacagctgaactaagctgacctacacgaaaacgcggatacatcgcaaaaaatagggctgaacatggctgttattgccagttcagcccatttgcatgattaattgcgattatttacgtaagaaattcgcactatctcaaggatcttgcatgtatatttcccgactggcactcgaccactaccgatcgtgggaacattgcgtgctcgatttcaaaccgggaatcaacattctgcaaggtgccaacggactcggcaaaaccaatatcgtggaagccatcgaagtgctttccacaggatccagccatcgcgcgtcatcatcactgccattaatcgaaaaagggtgcacgtcggccaccatccgagccaacgtggaagacggtgaaacgcagcacacctacgaggcgaccatcgtggcacggggtgctaaccgagcgcgcattgacggcggaaaatctcaatatatgagggatctcatcgggcgcacgccctccgtctcctttacccccgaagatcaacgtctggtagcaggggatcccgcaacccgacgcaacttcatcaaccaggccgcgtctctgctgctcccccactatgcgcagaccctgcaacagttcacgcacgtggcgaaacagcgcacggcactgctcaaacaactcggcgacggcacgaatctcgacccgcaatacggccagcaggcggtcttaagcgggctggaaatctggacggggcaattcatcgacctcggcatgcagctgacgcggaaccgcaacaacgtgatctcacgcttggaagagccttttgcgcggatctacgcgtctttggcgggagatgacgaacgggcggcgctcgcctacgagccgtccttcgacgaagtgatgctgttcgacgatccggccgcggagatcagccgccatttccaacgcatctaccccggcgaagtggcgcgcgggcagaatctgatcggtccgcatcgcgacgacctgactttgctgctcaacgatatgaacgcacgcgaattcgcgtccaacggtgagatgtggaccatggctttggcgttgaaaatggcgctatatgaggcggtttccgcacattttgaaagcaagccaatcgtgattctcgatgatgtgttcgcacagcttgacgaggcccgtcgtgggcagatcctcgattttgcgatgcggcaggaccaggtgctgatcaccgtcgccgcggcaagcgatattccgcgcatggatgctgggcgctttcacgcggacgcgcatgtgatcgacgtggccgcgttgcgcaggcaatcgcaagatggacagcatgacgatttgacggcgatgatggcgcaacttgtcgcgggacgggaatctgcaacgcaatcgtctgcagcgcaacagtcggtgaatcgacaggagcagcgctgatgccgaatccttcaatctgcgaaacattgcatctcgaccaacgcaagttgcccgccgaagtattcgaacgtatcagccgacgtgccggccgatataaggaacgtgaggaacgtgcgcggcaggcgtgggagaatttcggcaaacccggacgcgacccgcagacggtcggcaatattttcaacgtgatcgcaacgcaaggttcttggacgccgcatctgaaaatcgcgcagatgcagaatcattgggatcaggtggtcggcgtcgaaaacgcgcgccactcctaccccgtcgacctgcgcgacggcattctgacgatccgatgcgacagccccgcatggaccaccaccttgacgtacatgattccgctgctgaccgacaccattcgccgtaggctcgaggggctgaccatcaacgaggtgcgcgtcaccggcccgcaacaacagggattcagccgaggacgaatgacacgaaggccgcgatattagtgcgacaccacgtgctatcagacgttcgttgaaggcgcttcgtcgaagaattccccctgcgacgcttccaagcgggccgttcgcaacggtcgaatgttgttttccgaaagcgaaaaaacaggggtaaacggctggatttcaaggataaatgcctctggcgctctgtccccctccatgagtagaatatcaagtagtgtatgtaaacgcctagaaggggcctttatttgcgttctaggtggtatcacctgcgtgaatgaccctcattggcgggaaaaatgcaggaaggaatctctgtggcagaccttgatgcggattcgctgaacgaatcagctgaaaacacgcaggaagatcagatccagaacgatcagctcgaagatgcgcagctcgatgacaccttggctccggagcattacgacgcttccgatctgagggttctggaaggccttgaggcggtgcgaatccgcccgggcatgtacatcggctccaccggcccccgaggcttgcaccacctggtgtacgagatcgtcgacaactccgtcgatgaggcgctggcaggctacgcttcgcacatcgaagtgacgattctgccggacggcggcgtgcgcgtggtggatgacggccgaggcattccggtcgacgaagtgccgggcgaaggcgtttccggcgtggaaaccgtgatgaccaagctgcatgccggcggcaagttcggtggcggcggctatgcggtttccggcggtctgcacggcgtgggcatctccgtggtgaacgcgctgtcgacccgcgtcgacatcgaagtgcgccgacagggcttccactggacccagacctacatcgatcagaagccgaccgcacgtcttgccaagggcgagccgatgggcgaagacgagtccaccggcacttccgtgaccttctgggcagacggcgcgatcttcgaaaccaccacctacgatttcgagaccctgcgcaaccgcttccagcagatggcgttcctcaacaaggggctgaaactgtccctgaccgatttgcgcgaaccggatcaggccggagacgaagtcgcgggcgaaagcgacgacaatgccgaaccgaagcatcagacggtcacctaccaatacaacgacggcatcaaggattatgtcgattacttggtgaagtcccgcaaggcaacccccgtcgaaccggacgtgatcgatttcgaagcggaagacctgaaaatcggcatttccgcggaaatcgccatgcaatggaccaccgcatactccgaagcggtgcacaccttcgccaacaccatctccaccaccgaaggcggtacccacgaagaaggcttccgcgccgcgctgacctcgctcgtcaaccgttacgcacgtgaaaagaacatcctcaaagacaaggatgagaacctctccggcgacgacgtgcgcgaaggcctgaccgcagtggtgtcggtgaaactcaccaccccgcagttcgaaggccagaccaagaccaagctcggcaattccgaagcgaaaaccttcgtacagcgtgtgatgaccgacaagctcggcgactggttcgattcgcatcctagcgaggccaagaacatcatccagaaggccattgaagcctcccgtgcgcgtcttgcagccaagaaggcacgtgagaatacccgccgtaagtcaatcttcgaatctgcgggcatgccagacaaactgaaggattgccagtccaacaatcctgaagaatgcgaactgttcatcgtggagggcgactccgcaggcggctccgcaattcagggacgcaacccgatcacgcaggccatcctgccgttgcgaggcaaaatccttaacaccgagcgtgcaagcctcgaccgcatgatgaagtccgaaaccatcgaatcgctgatcaccgcggtcggcggcggctatggcgaggatttcgacctgaacaaagtccgctaccacaaggtcatcatcatggccgatgccgatgtggacggcgcgcatatcgcaaccctgaatctgacgctgttcttccgctacatgcgcccgatgatcaccgctggttacgtgtatgtggccatgccgccgctgtaccgactcaagtggaccaaaggcgcgcacgacttcgtgtacaccgacgccgaacgcgaccgcgtgctcgccgaaggcaagtccgccggccgtcagctgccgaagggcgaaggtatccagcgttacaagggtctgggtgaaatgagctaccaggaactgtgggaaaccaccatggatcctgaccaccgcattctgaagcaggtgcagatcgaagacgcggccgcagccgacgaaaccttctccatgctcatgggagacgaagtcgaacctcgccgtctgttcatccagcgcaacgcccgcaacgtcagctggatcgacgcgtagggatttcaaggacttcaggcaaggtttcataaggatttagaaggacttagaagttggcagacgaaaacaacagcaacgaagacggccagttcgtgcctgacggctccatggagccgttgagcccgcaggaggccgacaacaccgattacggcctgatggtgggcgaacgcatccagaagaaggatctgcagcaggaaatgcgcgattcctacctggcgtacgccatgtccgtgatcgtggaccgtgcgctcccggacgtgcgcgacggcatgaagccggtgcatcgccgtgtgatctacgcgatgtacgacggcggctaccgccccgaccgcggctactccaagtgcgcccgcgtggtcggcgaagtgatgggtaagtaccatccgcacggcgattccgcgatctacgacacgttggtgcgtatggcacagtcgtggtctatgcgctacacgctggtcgacggccagggcaacttcggctcccccggcgacgatccggccgcggcaatgcgttacaccgaatgccgtatggctccgctcgccatggaaatggttcgtgacatcgacaaagacaccgtcgatttcctgccgaactacgatggcaagacacaggagccgaccgtgcttccggcacgattcccgaacctgttgtgcaacggttcgtccggtatcgccgtcggtatggccaccaacattcctccgcacaacatgcgcgaggtggccgaaggcgtgcattgggcgctcgaccacccggacgcaagccgcgaagagctgctcgaaaacttgatccgcatcatcaagggaccggacttccctactggcgcaacgattctcggacataagggcatcgaacaggcctaccgtaccggccgtggtctgatcaccatgcgcgcggtggtgaacaccgaagagatcaagggccgcatgtgcctcgtgatcaccgagctgccgtaccaggtgaaccctgaccgactggtcgtctccatccgcgaagcggtgcgcgacggcaagatccagggcatcgccgacatgcgcgacgaaacctccggtcgtaccggtcagcgtctcgtgctcgtgctcaagcgcgacgccgtgccgaaggtcgtgctcaacaacctgtacaagcactcccagctgcagcagaccttcggcgccaacatgctggcgctggtcgacggtgtgccgcgcacgctgtctttggatgccttcatccgccattgggtgggacaccagctggaagtcatcgcacgccgtaccgcatacctcaagcgtgaggcggaggaacgcgaccacattctgcagggctatctgaaggccctcgacatgatcgacgaggtcatcgcgctcattcgtgcttccgaatccgcggaaaccgcgcgcacgggccttatggacctgctggacgtggatgaagtgcaggccgacgccattctggccatgcagctgcgccgactggccgcattggaacgtcagaagatcctcgacgagcacaacgaactgatgcgtcgcatcgccgactacaacgacattctcgccaagccagagcgccagcgcaagatcgtgggcgacgagcttgacgaaatcgtgtccaagtatggcgacgaacgtcgaaccaagatcctgccgtactccggcgaaatgaacgtcgaagatctgatcgcggaagaaaacgtggtcgtaaccgttacacactccggtttcatcaagcgcaccaaggccgacgaataccgtgcgcagcatcgcggcggcaagggcatcaagggcgccaagctgcgcgaggacgacgtggtggaccacttcttcctcaccagcacgcacaactggctgctgttcttcaccaacaagggacgcgtgtaccgcctgaaggcgtacgagctgccggagggatcgcgcgattccaagggacagcatgtggccaacctgctgcagttcgggccggacgagacgatccagaccgtgctgtcgattccgaactacgaagtggccaagtatctggtgctcgccacccgttccggcaaggtcaagaagaccgcgctcgccgaatacgattccccgcgtcagggcggcctgatcgcagtgcgccttatgaccggcgagaacggcgagaacgccgacgagctgatcggtgccgcactgtgcaacgccgaggatgacatcattcttgtgtcgaagctgggcatgagcctgaagttccaggccaacgacgagcagctgcgcccgatgggccgtcagaccgcaggcgtgcagggcatgaagttccgcgaaggcgacgagctgctggccatggacgtggtctggggcgattccgacaaggatctgttcgtggttaccaacgagggcttcgccaagcgcaccgccatcagcgaataccgtttgcaaggccgtaacggctttggcgtcaaggccgtgcagctcgccgaaggccgtggctccctcgtgggcgcggtgatcgttgaggaagatgaccagatcatggccatcatgaagtccggcaaggtcatccgttccaacgtcgacgaggtcaagcgcaccggccgcaccacccaaggtgtgacgttcgccaagccggacaagaacgacgagatcatctccatcgcacgcaacgaggagaaggatgacgaatccgcggaatctggcgaatctgcggaaaaaacggaatccgcggaatctgggacgaacgcaaccgtgaacgagggtgcttcggcatcgtctgaagccgctactgaagccaacgctggcaacggcgatggcgagaatgtagaggcatgaagacaagacaggcaatcgtctgcgaaaactggtagcctcagctaagaactgggcacaatcttgcaaggagcaacgatgagcgagaacatcgaaggacagcaaatgccggaggttgggcaggcaccgcgcgtggcacgttccgcttccagccagccgctgattggtgcggatcaggttcaggcgcacgagggtgcctcctccgcttccggcggtgtgaaggtccgtgagaagcgtcgcggcggcgctccgcgtgcacgccgtatgagcctgtctctgacgcgtatcgatgcatggtcggccgccaaggtggcgttcatgctttccatcgcgggaggcatcattcagattgtcgcggtggctttgctgtggggcatgctgaacgtggtcggcgtgttcgaccaagttacgcagattgtgtcttccactggcttggacgctggcggattcgacctgaccaacgtgttctcgttgggcactgtgctgagcgccgtcaccatcttctccattgtggaagtggtgctgatcaccgtgctcgtggtgattttcacgctgctgtacaacgtggtgagcaccctcgtcggtggcatccacgtcacgcttggagatgattaatagcgcagtgcgctattaatggcagcgagcggcgatagcgtccgcgagcgtcgcatgcaatgctgaaatagcgcagtgcgccgtcagtagcggcgatagcaaactcaaacgcaacaagacggtctgtgtcgtgattcccatcacgacacagaccgtcttcgtattttctagaccagtctgtctcttaccgtacgccaaaccctatctgcctctcccctgcctgcaatctgcccatatctgccctatatatggcagattttgccttccgacctgtaccatctcgcttatatatggcaggtcaacttgcgaaaaagccagttcgggggtatattttgggtcatttttcctaccaaggctgccatatataagcgagatatcaccgtacgaactctcaaatctgccatatataagcgagatagcggagctgcgcgagaggaagttgcggttatagctgaaactattgcgatttttagagatagtttcagttataaccggaactatcgtgattttgagtgattgtttcaaatgtaactgcaactagattgggtgcgctgaagtacgtgttgaaatacgaaaagagggcctgtctggaatgaaaccagacaggccctcaatgtatttcgatgagccagccgtattggctagattggctaaaacggctagatcagagcacgccctgggcgaccatggcgttggcgaccttcacgaagccggcagcgttggcgccgagcatcagatcaccctcgtggccgtattccttggcggcttccagagagttggcgacgatgtcctccatgatggacttgagcttgccgtcaacctcttcaaaagtccaggaaaggcggtaggagttctggctcatctcaaggccggaaaccgccacgccacccgcgttcgcggccttggcggggccatagagcacgttgttggcctggtagacggcgattgcctccggagtggaaggcatgttggcgccttcgcacaccacggtgcagccgttggcgacgagagccttggcggattcctcgtcgatctcgttctgggtggcgcacggcagggcgatatcgcacggaacggtccacacgcccttgcagccctcgtgatattcggagcccggcacacgctcggcgtattccttgatgcggccgcggtggcccagcttgatgtccttgaccacgtcgagctgaatgccgttcggatcgtagatgtagccgttggaatcggaggcggtcacaaccttcgcgccgagggcctgagccttctcggtggcgaagatggccacgttgccggagccggagatgaccacggtcttaccttcgaaggaatcgttgcgcagcacgcgcattgcctcggcggtgtaatagcacaggccgtaaccggtggcttcggtacgagccagggagccgccgaattcgaggcccttgccggtcagcacgccggaatactcgtcgcggatgcgcttgtactggccgaacaggtagccgatctcgcggccgcccacgttgatatcaccggccgggacgtcggtgaactggccgatgtgacggcacagttccgtcatgaaggcctggcagaaacgcatgacttcggcgtcggacttgcccttcgggtcgaagtcggatccgcccttgccgccgcccatcggcaggctggtcagggagttcttcaggatctgctcgaagccgaggaacttgatgacgccttcgttcacgctcgggtggaagcgcagaccgcccttgtacgggccgatcgcggagttgaactggatgcggtaaccgcggttgacctgcaccttgccctcatcgtcggtccatgcgacgcggaacttcaccacgcgctccggctcgacgatgcgctcaagcacgcccgccttctcatattccggatgcttcgcaaccaccggctcgaggctttcgaaaacctcgcgaacggcctgcaggaactccggctggtcgccgtcgcgcttctcgacctgcgcgtacacgcgcttgacgtactcgtcagtgagcatattcttccccttcgggatagttgggttaccaatagacggtctcattctatgtgcacgaatatggacggcacaagaccttgttcaggatttggagacgctttttgcgagtgctggttctgaacctgcttctttttacgggattgccgtgccttgtgttgcctataggatggaaatgcggaaagcgtgggagagagtacgtccgcaataacatctcacgatctcacataatgggagaatcatcatgattgaaggatttaagaaattcattgcacgcggcaacatgatcgacatggcggtcggtgtcgtcatgggtggtgccgtcaccacagtggttaactctattgtcaataatgtgattaatccgttcatcgccatgattttcggcaaaccgaatatggatggtctgctggcaatcacattcaataatgcgacggtttcgttcggcgcggtacttggcgcgatattgaatttcctgattattgcggcggccgtgtatttctgcattctcgtgccgatcaacaaattccgtgacgtgaccgaggcgttgctcgccaaaaccaagcttgcggaagaacggagcaaagccgaggaggaagctgccaaagagccggaaatctccaccgaagagcagacgatcctgctgttgcagcaaatccgcgacgaacttgccaggcagaatgcacggaatacacagaacgtgccgaacgattccgacactgttgccggtgcagtcgcagtgcggtagtcatcgcaagcgatcgtaataatcaataattcaaggccgtctcaagcggtgacgcaagccccgcctgagacggccttttgcaatggtctttcagcggggtgattcttccatgcgctggaataatacggactctggaaggtgcctcagcgggtcatatgttccagtgactggagggatctggactgtgaggtgcttggttgcgtctagttttctccagtgactggaggttttgggatgctgggaggcttgttggtgggaggattcctccactcggtggaggtttttggactgtgaggtgcctggctgcgtccggttttctccagtgactggaggaattgggatgctggtttggatttcggatttgggtatgaaaaaagggtttccggaaatcaccggaaaccctatctgtggagctaaggggattcgaacccctgaccctctccatgccatggagatgcgctaccagctgcgccatagccccgtggagctagccgggttcgaaccggcgaccctctgcttgcaaagcagatgcgctaccagctgcgctatagccccatagttgaaaaaaagcggccgcgccgctcttaatcaccgtgggcccgggaggacttgaacctccgacctcatccttatcagggatgcgctctaaccacctgagctacgggcccgttcctgctgcactgttaagcacaacgaattgaaataatacgcgaatttcagagaaagtcaatacaaggtgtgtcttcggcgtgtcgtgacataatgcagacatgccgaacaatcatcgtagccagcgtaacaatagtgggagagccagcaggggagtgcgcaaccgtaatcgcacgctatccgaagaaaccacgcaaatcgctggaatgacggtgaccatcgtgcgtaaagccatcaaaaacatgtatctgcgcatcaaaccgccgaacgcgcaaatcgtcatctccgcaccttctcgcatgtcgcaagcggcaatcgcacgatttgtgacggaacgcaaaccatggatcgaacgtgcgcgacgcaccatgctgcaagccaaggatgaacagatccgtcaaagcgatttcaatggtttggaccgtgtgaatggttcgcatggtccggataatctgaatggcctggaaaattcgggcggcgtgggcgatcgaaacaatccaggcgatcccaatagcttgaataatccgcgcgttttcgtgtggaacgacgcggcgaaggaacgggccgtacgggccatcaatgcgcaactgccggtgctgcttgcgaaatggtcgccgattatcgggcggaagccgacgcatgtcacgttacgcatcatgacgtcgcgatgggggtcatgcacgccgaaaaccggccgcatccgactcaacctgcaacttggtcttatggatcccagattcctggaatacgtgcttgtgcacgaaatgacgcacctgtgggaaaacgggcacggagaggactttcagcggcgtatgagcgcatatttgccgcaatggaggcaattgcggcgggatctgaaccgtcatgttgtgttgtgatgctcgcgatgctgttgcgttcgccgtcacgctgccatgctgcgatgagcttgcgtagggcgatgttgttgcgttgcctgtgatgttgaaatacttgcgatatcacgccactgccgtcacattgcgcggattgccatgactagccacggcttacgcacgtttgataacgacgtataggtgattcgtatagctttttgttcataagatgtacagaacgcttaacatccgcgatttgcaagcctacaatcgtgacgactgaaacgtttgcgtgcaaacagtccacgcagaaagatcgaataagtgagggaggggtcgattgtgactgtattgagaaaagtcggcattatcggcatcggatacgtgggcgcgcatgtcgcaaatgccgtgctttccgcaggactggccgaagaactgaagctgtgcgacatcaacgagcaaaaagtagtcagcgaatgtcaggatttaagtgacacgttgggtttctatccgcataactgcgtgatcggcaactacggcacgcaatacgagcagctagccgactgcgacgtggtaatcaacgctgccggcgacgtgaaaaccagcgccaaagatcgtgacggcgaactgttcgtcaccaccgacattgcacgcacctggatctcccgactgttcaacgcaggcttccacggtgtgatcatcaccatctcaaatccgtgcgatgtggtcgcaaccgaaatctggcacatcaccggctacgatccgcgcaaaatcatcggaacgggaaccgcgttggattccgcacgactgcgcaacgccatcgcgaaacgcgtcaacgtggatcagaaatcaatcggcgcatacatgctgggggagcatggcaattcgcagttcgcctattggtcgaacgtgaacatcgcaggcaagccgcttgatcaactcgcacaagacgatccgcaacgattcgccctcgacaaggacgaaaccgagcaggacgcccgtcgaggcggataccgcgtgtacgccggcaaagagtgcacggaatacgctattgcagccactgcggcacgccttacgcaggctgtgctctgcgatgaacactatgcgaccgcctgctccacgctgcttaccggcgaacaaggcgaaagcggcaattacgccagcctgccgtgcatcatcggagcgaacggcgttgaagaagtcctcagtcccacactcaccgaaagcgaacaggccaaattccatgcgtcctgcgagcatatccgcgccaatatcgcgcagcttgcatggtggaacgacgaatgccatcccatgctgcgcggctgaatctgcaataactcagcggatttaataacagagcagacttgcgattactgatgttgattgtgtaaaaaatcagcatttacataatcgcaagtctgttttattttcattttattttcgttttatttttgattatttcgtagctttcgcagcatcgacgtcaacagtatgcttgcggatttccaacgtttcgatacgacggccgtccacttgcgtgacggtcatgtcataaccgtcgtcggaaggcagcacgtcgccgatttcgcccatctttccagtatgcgccaggaaatagccggcaaccgtttcgtacggaccgtcttccagctcaataccggtcaaatcggcgaaatcctcaatcgtcatgccgccttcgatcgtggcgacgccattgacgaaagcggcgcgttctgtgcgttcgccgcctttctcttccggcaggtcgtattcgtcgcggatgtcgccgaccaattcctcggtcatgtcttccaatgtgacgatgccgtcggtgccgccgtattcgtcgatgaccaccgccaggtgaatgccgcgcttacgtagcagctcaaggcttggcagcagcttcgacgtgcccggcagggaaatgccctcacgcgtcacgtcggcaaccgtcttcgccttcggatcgcgaatgtcaagcaggtcgcgcacatgcacgaaaccaagcacatcgtcgaaatccttgccggtcaccggatagcgggaatacggcatttctctcacatatgcggccgccttctcaatcggcatatcgccatccaaaaaaaccacgtcggcacgcgggcgcatcacttcggccacaatcgtttcggacgcgtcgaacacgtcgtcgagaatcgtgcgttcgtccttgctcaagttcgtattggtgttgacgagtacgcgcagctcttcgtcggacacttcgctgtcggtttcgttcgggtcgaaaccaagcaagcgcacgataatgttcgtgttcttgccgatcagccaaataatcggcttgcacaccttcgcaaacacatgaatcgcaggtaccacggcacgcgcgatctgctcgttgcgttgcatggcgatacgcttcggcaccaactccgaaatcacgatcgaacagtacgaaatgatcaacgtcagcacaatggtggtcaggggagcggccacactcgtcggcacgccccaactttcaacgatcggcacaatataaggcgaaatcgacgattcgccgaacgatgcggaaaggaaaccgctcaacgtcacgccgatctgcacggtcgacaaaaacgtgttcggatctcgcgcgatctgtgcgacgcgctttccgcgggcatcctcctgttccatctggtcgatctgcgatccacgcaggctgaccaacgccagttcggtgccggcgaacaccgatccgagcaacagaaaaacgaaaatcaggagaatgttcaaacctagagacatggttccactctatcggggcggtatgtcaaagtgtctgtatctcctgattttcttggattttctcaattattcttagattgcttagcttcggattgttcttttttggatctctgttttgcaaatctccgttttccgaattgtaatccgtttcagaagctaagaacctcgactttgccggagtccagctggtaccttgcgccgacgatcatgagtttgtcggatgccagcgcctgctggatcgcttcggattgttccaccaagagttcgatggtgcgcgcgatgtgcacgcgttcgaaatcctcgctggattccaattccgactcgtgcgcctgccagattgagaaaccgacggtgcgcatcatgagcgaatccgaagcgcagatgcgttcgtcgatgtcggcaatgctgtcggcggccatcagcgaatcctcggcatcggcggtcagttcgtgcagtaacgcctcgtaatccttggaagcttgcttgatcgcaccgcaattctggtggccgagcaccaccagcaaacgtacgccgagcacggtcaccgcgtattccagggatgcaagcacggcttcgtcgatgatttgaccggccgtgcgaaccgtgaacaggtcgccaagaccggaatcgaaaataatatccgggcttacccgcgcgtcggagcagctcagtacggccgcttccggtgcgtgtgtgtctacaagtgctgcgcgtgcttcggcgccacgattcggatgttccggtttgccctccgcaaacctgcgattgcctgccagcatgcggctccatgcgccacttgccgtaccttcgacctcgttctggtctacaaacagttcgtctgccattgactccacccttcattgttcaggctagccaacatcatacgttttggtctgaccgttcgctgggaaatagagcgatatctcgcttatgtatggcagatttcgtgttctgtccggtgatatttcgcttatgtatggcagtcccaaaggtgaaaaaccggaaaaatgtacccccgaagtgggttgttcgcatgatggtctgccatatataagcgagaaggctcatgacaaggctccgattctgccatatataaggcagatataggtatgaaaaagggtccccgatcggcagtgcgaacggggaccctgaaagaaactggctacaatcagccggtgttctgcaggcctgctgcgacaccggacacggtgcacaggatcaggtaggtgtagttctccttctgtccgtgcgtgagctcttccttgtccacgcgcttgcgtagcgagccgagggcgagcacctgagtggcggacagcgcatccacgtacggcgagcggatgcggatggcctggccgagcacgtggcggtgctgcagaggccacttgtcgcctacgatctcgagcacccacttgcgggtgagctccatctcgtcgaggaccttcttgttgaggtcttcacggtctccgagggcaaggtacatcttggcgatgcgctcgtcagtcttggccagcgacatttcgatgttgtcgatgaacgtggagaacagaggccattcctcatacgcttgacgcaaggtgttcaaatcgccgaactgttcgcacgcggtgcccaggccgtaccatgcggccagattgatgcgtgcctgcgcccaggagaagatccacggaatggtacgcagatcgtcgagggacttggctccaaggccacgtttggccggacgggagccgatcggcagcaggccgatttcggtcagcggcgtgacggtggagaaccacggtgcgaagccgtcggtgttcagcaggtcgaggaagcggttatgcgcggcctcgtcgagcttgttggccatgtcggcgtacttggcggtcatgtccgtattgcgcttctccacgcttggagcggactgcagcagcgttgcagccgcaacggactcgacgtggcggatggccagtgccgggttgccgtagcgtgcgaagatgacctcgccctgctcagtgagcttgaagcggcactttacggagccgaccggctgtgcgagtacggcacggttagccgggccgccgccgcggccgacggcaccaccgcggccatggaacagggtcagatcgatgtcatgcgattccgcccacttggcgatgcgttcctgtgcggaatgcagggccagggttgcggaggttgggccggcgtccttcgaggagtcggagtagccgagcatgacttccatcttgccgccggtggccttcagacgagcctggacctccggaatcttgatcatttcctcgagtacgtctaccgagttctgcagatcctcaagctgttcgaacagcgggatcacgtcgatggttggaacatccttgggatgggagaacgccagacggttcagctcgtacacgtccctgatgttttgggcgctcttggtgaaggagatgatgtaacgacgggcggccttgatgccgttgcgcttctggatggaaccaagggcgcggaaggtgtcgagcacctcgtgggtcatcggctgcagttcgccacgctcaccgtgcagaccatgttcgcggatatcctccagcgctcgggaatgcacgacggagtgctggcggaactccatctcgaccatatggaagccaaaggtctctgcctgccagatgaggtcctgcagcgggccgtaggcagaacgtttggcgttggcttcggcgagggagcgctgcacgaccttcaggtcggcgatgtaatcctcgcaggagtggtacatgagatcagcatcgcggtcgatggtggccttcagacgatcggccatgaccagcatgacggcacggtgcagctccttggtggagatcagtgcggccttgtcggtcaggcgctcgctcatttccttctgatggttccacaggctcttgagctcggcactcggcggagtggtctcagcttccatcgtcaggttcttgccaacgcggcgggtctcgatttgcaacgcgcccagcacgtggtcgctgaacttgcgggccacctgacggctcaccttggcggtgacattcgggttgccgtcacggtcggagccgatccagcttcccgggtggaagaacgccgggcataccggcggcacgaggccagccttatctccgaggatccaatcgtcgaaacgacggtacacctgtggaatggtatagaacaacgtattgtcgaaaatatcgagaatggtttcagattcctcaaccggagtcggcttcttcagtgcgatcggagaggtgcggaacagcgcgtcaatctcgttgaagagtcgacgggagttttccttcctgtctgaaccgccaagcagcttgtgcgttgcgagcagctgggagatgcggcggattttgccttccacggctttgcggcgggcttcagtcggatgcgcggtgaacaccggatggaactcgagctggtcgagcagttccttggctttggccggccccatttcgttaatgagctggtggtaggcgcaggtcatttcgttcactgggtcgacggcttgggtgtcatctacggcggcctcacggctgtgcagcacggagacacggtagttctcctcgcataggttggccagatggaagtaggtggtgaaggcgcgggccagcagctgtgcctcatgcacatccgttttatcgatgatgtcgacgaccttctgcaggtcatcctgatccggattcgtatccgtcagaatgccggagaaacgttcggcgctggcgttcagtgcgtgttcgcgcacttcatcgaacttggccagcagcttttcatcgaattcgccgagcacctcgcgaagaatctgcaaacacagatccatttcctctttgagggaagcgggaagatcacgctcctcggggcctttggtgccggtgccggacgagacgatagctgcgtcggcaggcgtgatctgttcgttttctgttgtcatcagacctccttctccaaaccatcgggttgcccggtctgtcggtccttcgcggcacctccgcgattgttttggccgtctgttgcgagcccacagccctaagttcggtcggtaatgcacgcccattgtatgctcggcaaatcgacagtttggttacggaaacaccggaaatgtccgcatcgtggtccgacggtgtccacaaagtgaaatcgatggaaatttcgaaaatcctccgaccagcccacacgttagacctgaacttgtgagcgcacaatacgaacatgaacatgagacgaatttcgatagcgcggaaaaaagcgcttcggccgtcagcaaattccatacacactccattccgctcgatatggaagatatcgaacgggattgggacaagccggtcgctgaagcgggaatcgcagcaaaagccagcgtgatcgtacgcgtcggcatgctcgatctcggcgcgggcaccggaagcttccgcgtacgcgaaatgatgcaccgcatcgcctatccgctaggcgtgcacgtgcgcgccgacgtgaacctcaccgacatcgaagcctcctgcaccgacggcaaagaccgtatcaccgaagtcgtcgacctgccaaccaccggcgtcaacacggaacgcatttggctgctcgaacacttcgctgactggttcaacgtgaacctcggcaaaggatcgatgtaccacagccaatccgacgtgtccgaagggcttatgcagcatctcgacaagcgtgatgcgtcgcaggtgtcggctgacctgtcgaagcgtcttcgcgaacgtcagaaagccgaacagaatcaggagggatctgacgatcccgtgctcgacgcgcttgaaatggtgacggaacgcgccgaagtgaccgataccaccgcgcagccgttgcacttgcgtgatatcgaagcggcaagcgagcagcataatcgcggtgaacgtgaagccgaacgtgaaaccaagcgtgaaactgccggtacggccaacgttacgtcaagcgaatcgactacgaaaaaagcgcacaaaaatcgcaatcacaagccgccaaaaggtcaatacgccgaacatttcgaccacgtcggaaaagaagcggaccaatcgcaaggcatcaccgttcgccaagcccacgaacgactcgacatgatcgaacgacgcaaacccctgtattcgccggcgttcgcgggattcgcctcggcctgcgcctgcgcatccttcgtgttcctgcttggtggcggtcccttcgacatgatcggcgcgttcattggcgcgggacttggtcactggctgcgccgccgcctgttcgcccaccatctcaaccagttcttcgtgacgttcgtatgcgtggccgtcgcggcactcgcctgcacgggcaccctgcgattgattggtattttcgagcccgtcgcattgcagcatgatacggcttacatcggtgccatgctgtttgtgattcctggattcccgctgattacgggtggacttgatatggcgaaaattgattttccgtcaggtattcagcgcgttgcgtacgtgttgtgcattattttgatggcgacgctcgcaggctggatggtcgcttcgatcgtgcatttgaatccggaaggattcgagccgttgggactcaatccggttgtcaattgcctgttgcgtttcgtgttcgcattcatcggcgtctggggcttctccaccatgttcaactcgccgcagcgcatgtgccttgtcgccgccaccattggcgccattactgacaccttgcgtttggaaatcgttgacatgggcgttcccgccgaagccggcgcattcatcggcgcactgctcgcaggcctgcttgcctccgcatggcgttctgcggttcatcgcagctggctcgccccgcatctcggctacccgcgcatctgcctgaccgtgccgtccatcgtgatcatggttcccggtttgtacatgtatcaagccatgttccacctcggccaattcgacaccttgaacgccctcgactgggctttccgtgcgttcatggtgattatctgtctgccgatcggcctagccatggctcgcgttatcaccgataagtcttggagatacgatatttgatccgtttcggcatttgggcgcgtaaatgagataaatgcgattgtcgcaatgttcgaccggtacattgggacaatcgcatatttttttcagaagagattcgaaagaaattcgtttcgacagagatttgaagaaagagattcgaaagaaattcggctagcaatctaagaagagagaattcatggttaccaaagatttttgggtgctgctggcgatggtcatctattttgtggccatgctcaccatcggcttcatctactccaagcggtccaattcctccactcgtcagtatttcgcgggtggtcgaggcgttggtccatggctgacggcattgagcgccgaagcctccgatatgagcggctggctgctcatgggactgccgggcgtcgcctacttcaccggtgccgccgacccgctgtggacggccctcggcctggctctcggcacctacctcaactggaagctcgtcgcacgccgtttgcgccgctactccgtggtggcaggtgacgcgatcaccattccggacttcttctccaaacgattccatgacaaacgcaatatcgtctccaccatcgcggcgctgatcatcctcgtatttttctgtgtgtatgtcggtagctgcttcgtgacggtcggcaaacttttctcgaccctgttcggctgggactaccacctgaccatggtgatcggcgctgccatcgtgttcgcctacaccgtgatcggaggctatctttccgtggtcgtgaccgacttcatccaaggcttgctcatgttcttcgcgctggcagtggtgttcatcggttccgtcgcatccgtcggcggcgtcgacaacaccgtcgccttcctcaaaggcattccaggcttccttgacggcacgcaaatggccacgccgattctgaacgatgccggcgagcagattgtcaaggctggccaggccatgttcggcgcgcctaccgaatacggcgtgatcaccatgatttccatgcttgcgtggggtcttggctatttcggcatgccgcaggtgctcgtgcgattcctgtcaatccgcagttccgaagagatcaagaagtcccgtatcatcgccaccacgtggtgtgtggtgtcgctggcgtgcggcgtgtgcatcggtttggtcggccgtgcgatgatgccgacgcagttcgtcacgcagtccgcggcggagaacattttcatcgtggtttcgcaggcgctgctgccgagcttcatgtgcggcatcgtggtgtcgggcattttcgccgcgtccatgagctcgtcgtcgtcatacctgattatcggcgcttccgcggtcggtgagaatattttccgcggattgctctatcgcaaggccaccgatcgtcaggtgatgatggttgcgcgcatcacattgctggttatgttcattttcggcattgtggttgcgttcgatcagaattcgtcgattttccaggttgtttcgtatgcatgggccggtttgggcgcttcgttcggtccgctgatgctctgctcgctgtattggcgtcgtaccaataaattcggtgcgattgcgggcatgctttccggtactgcgaccgtgctgatctggcataatttcatcaagccgcttggtggtgtcttcgctatttacgagctgcttccggcgttcatcatctcgctgctgttcattgtggtggtgtcgctgctgactccggctcccgatgctgaagtgctgcacgagttcgatcattatcttgatgatcccgatgaccgcaaggtggatgacgatttggtcgcagcggaaatcgcttccggcgaaaagcgcgcgaaaatctaatcaaacataatgtggcacatgccactcaaacgcaacaaaggtcggattgtgcaatacgcaatccggcctttgtcgatgctgaaacgctgtttaaagcgtgattatggtgtttctggagctttagtagcgcatgcccatggcgtcgcgcacctgctccaacgtttcgttggcgatggcgttggccttcttgttgccttcggcgagtacgtcgcgcacgtaatccatatccttggcgagttcctcgcgacgggcgcgatgcggctcaaggaagctgttcaccgattcgatcacatacgccttcagcgcgcccgcaccggaatcgccgatctcctcggcgatctccttcggatcgcgaccggtgaccaaaccggcggtcgtcagcagtgcggaaacctgcggacgtgcgatcggatcgaacgtgatgcggcgctcggaatcggtcggactcttcttgatgagcttggcggtctcctgcgctgtggcgcccaacatgatggaattgccgtacgacttgctcatcttgcggccatccaagcctggaatctccggcgcttcagacagaatcgcggccggctcggggaacaccggatgcttcttggcgtagcgttcgttgaaacgacgcgcgatggtgcgcgtgatctcgacatgaggcaggttatccttgccgatcggcaccacattggccttgcagaacagaatgtcgcatgcctgatgcaccggataagtcagcagcaggccggtcagcgcatggccggaagcttccatttccgacttcaccgtaggattgcgatgcagctcggcctcagtcaccaatgacaggaacggcagcatcagctggttctccgcaggaacggcggaatgcgtgaaaatcatggtcttttccggatcgatgccggcagccatgtagtcaagcaccaaattgagcacattgtcttcgatgtgcgcggtcgtgtcacgatcggtgatcacctgataatcggcgatgatgatattcgaattcacgccgcgattctgcatggcgacgcgctcacgaatcgaaccaaaataatggccgagatgcagacgtccggtcggacggtcgccggtcagcatggtgaacttgcccggattctgttcgattgcggcgagcgttgcgtcggaacgcttcttcgctgcgaggaagctcgcgctcatttcattgccgacagcggtgatctgctgctcctgggtttcgtccgtcatacgtgtccttttcttaagaaaatcagcgattttatcgtaaaagtctgagccgacaacgaaatatggcacagcaagtggtactctcttgtttgatgaattgatagcacagtaatcctcagggggtcagatgggccgcggacgtcagaaagccaaacagcagaaaatagcccgaaagctcaagtacctgaccaccgacaccgattatgatgagctcgccaaggagctcggtgcccaggagcctggttcgggttcttttgatcctttcgccgatatcgaagcaaaatattctcacgatgcggacgctgaagatgagatttctgaagatgctcaggagtccgcgcaaaccgacgccgaggatgacctcgacgagtatgcaaagtgggccgcagaggcggcggcgaaggccacgagcggagagttcccggcagccaagtccgtcgcgccgaagccacacaagcccatcccgatgccgatgcccagcgcactgaagccgaagaagcaggactgatcggcatatcaggtactttgtgaaaccgcgatgcggatatgcctgccaggtgtatccacatcgcggttttgctatgcgtttttgcgcctgtgacggtcttctcgcagcctgtcacaccaacggcagcaagctactcaaatcgtcgcgttcgccaacggcggtgatgcggccggcatctttttcctcctgccagctggtgatgcccgtggcgagtctcatccacacgtccggttccagttcgatcacgtccggcggtgtgagattatgcggatcggatgccggtccgtcgagaatcttgatggcaccccacggtgcgacacgcacttccacgccctctccgggcgcttttttctccagcagatgcagcgagtagcgcactgccatcgcccacagttggcgtggcaatcgtggagagaattccagacggaaatcgcgtgccgcgtcggtatttgcgggaatattgtcggcgatcatgcgatgagacgtttgcagccattgtgcaaatgcgtcatgccccttatgcagatcttgttctcgaataacagccatacgtgttattttgccgtttgcgagcgactatgatggggtgttgcagacaacgtagtcacaactgaataggggtgtgaagagagggaaaatacttgcgattcttgacagcgttcgcaatgttgttgcatgtcgtttgcatgttgctcgcaacgtttttgcagccggtttgcattatttctgcaaacgaatgcttgcttgtaattgcttgaaatttcatctttttatgattacgtagtatgctatgtatgagaacgtatgcatgatgttacttagtgttcatgcggccgctaatgcaaggacgctggagcaaggcataatgttcctggagagtaatccgtcaaagggagtcgattaatgactgaaattaccgcaccgaagtccgcggtcaccgcggagcagttcgcagacgagatccgcgagcagctgaagtacacccagggcgtcaccgtcgagcaggccaagccggccgacgtgtacgtcgccgcgtccgccgcagtgcgccgccacctcatggattcctggttcaagacccagtccgacatggtcaacggcaacaccaaggcagtcggctacctgtccgcagaattcctgatgggcaagcagctgcgcaacgcgctgctcaacgccggtctgaccgagcagttcgacgccgcggtcaaggaactcggcttctccgtgcaggacgtcgtcgacgccgagcacgagccgggcctcggcaacggtggcctcggccgtctggccgcctgcttcatcgattcgctcgcctcgctgggcgtgccggcattcggctatggcattcagtacaagtacggcatcttcgagcagaagttcgatgaaaacggcaagcagatcgaaaccccggactactggctgaccaatgaagagccgtggggacacatcgattacaaccgcgaccagaaggtttccttcggcggcgaagtcgttgaggaagatggcaagaaggtatggaagccggcttggtccgtgcgtgcggtgccggtcgactacatggttccgggctatgcttccggtcgtgtgaacaccctgcgtctgtggaccgccaagagctacgacgagttcgacctgctcaccttcaacaagtccgagtaccttgacgccgtcaagccgcaggttgaagctgagaacatctccaagatcctgtatccggaagattccaccccgcagggcaaggcactgcgtctcgagcagcagtacttcttcgtgtccgcctccatccacgacgccatccgcgtcttctacccgggtcaggacaagccggatctgaccaccttcgcggacaagatcaccttccagctcaacgacacccacccggtcattggcattccggagctcatgcgcgtcctcatggacgagtacggctacgattgggacaccgcctggaccgtcaccaacaagaccttcaactacacctgccacaccctgcttccggaagccctggaagtgtggccgtccaagctcatcggcgaactcctgccgcgtcacctcgaaatcatcgagaagatccaggaccagttcgcagccgagctcaaggccaagggcgtcgacgaagccaccatcaaggacatggccatctacaccggcgactccgtgcgcatggcctacctggccacctacggcggctcccacgtcaacggcgttgccgagctgcactcccagctgctcaaggacgtcaccctgaagaacttctccgacgtgtatccggacaagttcaccaacgtgaccaacggcgtgacccctcgccgcttcgtcaagctcgccaacccgcgtctgtccgacctcatcaccgaaggcctcggcaccgacaagtgggtgagcgacctcgaactgctcaagggcctcgaaccgctcgcagccgatgacgaattcgtcaagaagttcgccgccgtcaagcaggccaacaaggttgacttctccaactacgccaagcgcgaatacggcttcgacatcgacccgaacaccatgatcaacaccatggtcaagcgtctgcacgaatacaagcgtcaggcactgaagatcctcgccgtgatcgcacgctacgccgacatcaagtccggcaggatcgccgccgacgatgtcatgccgcgcaccatcgtgttcggcgccaaggccgctccgggctactacctcgccaagcagaccatccagctgatcaacaacgtcgcccgcgtcatcaacaacgacccggatgtcaagggcaagctgaacgtctacttcccgtggaactacaacgtgcgtctcgcacagcacctcatcccggcaaccgacctcgacgagcagatctcccaggccggcaaggaagcctccggtaccggcaacatgaagttcgctctcaacggcgccatgaccgttggcaccctcgacggtgccaacgtcgaaatccgtgagcgcgtcggcgctgagaacttcttcctcttcggcatgaccgtcgacgaggtggatgccctctatgccgaaggctacgatccgaggaagtactacgaggccgatcctcgtctcaaagccgccatcgacatggtcgcggacggcaccttctccaacggcgacaagaccgtgtacgaagaccttgtccacgattggctcaccaaggactggttcatgaccctcgccgacttcggcgcctacaccgccatccagtcggaaatcgaggccctctacgcccagccgctcgaatggaaccgcaaggccctcatcaacgtggcgaactcgggctacttcagctccgaccgctcgatggaggattacctcgagcgtatctggatgaccggtccgctcgcagactgacggagcgttatctgcgttgtggaaggctcgacgtaccttcgtacgccttcgccttccacgccttgataccgcacgcgtcagtccactcgctccgctcgcctgatagcgctaggtaaagagtgatgacgaagggacgattctttggaatcgtccctttttatgtctagataacaaaaagccctgcgcaaaagggcggcagggctttgaaaagaagtaggaattaggcggcttcgggagcggcggcggcctcagtgtcggcttccttggcttcttcggcatccttggtcagaccaagatcgacaggagacgagctgttctcccatggctcctcccacggatcgtaatccggattctgctgcttgtacacatacagaccgacgacaccggcaagcaaagctccgaagagcagtgcgaagaacttccaaccgttagaagacttgttctccatgacggatcctttcccaaatatcggcgaacattggctgacctgctcgttcaagccaactctgttcactatattaattccttgaatgtgttgattgggtggatttacgcgccggggattcacaagaatgcaatcatttgcaatgatttcgcagattcgcggattcgcacgttccagtagggttgaaacatggcttatcaacgtttcagtctgtttcccgattccccgtcgttcaaagacttcttctctgcacgttccatgcgataccgttggcgtaacggcgatcctgtgatcaccgttacgatcatggcgatatgcgtcgcggtctggattgtcgaaacactattgaaaatcgtctggccggccggctgcaacgcgttcgtcggctcaggcgtattcatgcccgcgctggcgactcaccgcccatggaccttcattacgtcaatgttcctgcaccagccggcctccctatggcacattcttttcaacatgctgaccttgtggtgcgtcgggcctgtattggaacgcatgatggggcatctgccatatctcgcgttatacgtgctgtcaggactcggcggaagcgccggcatgatggtctgggcactgttctcgcaagacggttggctgacatccgcatacggcgcttccggcgcgctattcggcctgttcgcggcaattctggtggtataccagcgcattggcatcgacattcgatccatgctgatctggatgctcatcaacttcctgatgccaatcatcacgccgaacatcgcatggcaggcgcatgtcggcggattcatcatcggaggagtgttcgcctggctgttggtttccggtctgcatgcgttgcgcggcaaaagcctgcagcagcgcacgctgatgtacggcgtaatcatgttggccgtgattattgcgattgtcgttgcatgcaatatgagcaatccacttctcacaaacccccttcttggcatgttctcctagttggcaggaaggagaaaaacagatttggggaatcgcagacacacacttatccacaagtgtggataagtgtgtggataagtgagggttgagctgtgggtaagtcggggataactcggtgcattatccacaaggatattcacaaaacggtggattccccggcttttcaacggtggaaaatgtggataacccgactgtgcatagtggaaaaatggggaaaaacaccatcctatatattgtggacggtcataaaactgcctacaagatatagacgctatccacattcgtccacaataatccacgacttatccacatcgtgtgaaaccagaaaatccccagaatgacgacgaatcaacacaacgaaatcaggtacgtcaccaatgacaatcatgaatgacgagacgcgcgaattcgtggcgatgcatcgcaacgaggacgtgcgcgaactggcgttgaaggccaaacgtgtggaagggctcgacctgccgttggcgctcgaccagattgccggatggcagatcgcacgcaaaaaactgccacaatgggcctcctgcgagggaatcgtatatcctccgcacatttccatggaacagtgctcatcgcagttcacagcccaatacaagtcagaaatcgcacaaacactgcttgcgccggccgcaaccgtgcgcgccagagtgtccgattctggagaatcggacaaccaaaccacgaaaagtgagccacagttgtccgattcgccagaatcggacacattggtggcgagaagggcgatggtggatctgacgggcgggttcggcgtggacttctcgtatctggcgcgcggattcagccaagccacttatgtggaacggcagcggcatctgtgcgatctggccgaacacaatatggccgcactgggactcgaccaggcgcgcatcgtgtgcggcgacggcgtggaatacctcaggcagatgggtccggtggacttcatctaccttgatccggcccgccgcgacgagcatggatcgcgcacttacgcgatcgaggattgcacgccgaacgtactcgaattgcgtgacctgttgctcgccaaatcgcagtacacgctggtcaagctttcgccgatgttggattggcgcaaggcggtcgccgatttcgacgggaccgtacgcgaagtgcatatcgtggccaccggcaacgaatgcaaggaactgttgctggtattgggtcagcaggtgcatgaggaaccatccgcgccgcgcgtgttctgcgtgaacgacaatcagcggatcgactatgattccgccgcatatacgcagggcctgcgcattggcggcaaaccgctgccggaggcgaaaaactacttgtatgagccgaatgcgtcgattatgaaggccggttgcttcgatctggtggaggaacgattcggtgtgacgcaggtcggtccaagcagtcaccttttcgtgtcggcaacgccggttgccgattttcccggcagaggattcgcgattgaagcgatcggcggcatgaataaaaaggatataaaacgactgctgaatggcacgaaacaggccaatatcgcggtacgtaacttcccgcttaccgcaccgcagctacgcaagaaattgaagcttgccgacggtggtccggtctatctgttcggcactaccatgcaaggctgcgatcatgtgctgctgcgcacgtcgaaaatctgaaaaacaaaccggaatcgaaaaaagaaacaggcgaaccgggattggcaaggcagtcgcgaaagaccgcgtacgtttgcgaaagagcgtgaaacctacgaagaaaacctacgaaaagattgcgagataatcgtaaaagggcatgcgaaaagggcgtctgaccgcacgctgtacagacgccctcaaatcgcaggaaaggcgaaactacgctttagcgccaccacatggtcatgatgaatccgatcatgatgatcgcgaatgcgatggccagattacacgcgccgatgttcggaatcgggtagtcggaagtcaggtagtagacgaccgcccagatcagaccgatgatcatcagcgcgcagaacagcggcacgaaccagcgtggattggacttggtgcccttgatggtttcctccacgcggcgggtgttctccgcctgacggttcatcatgcgctgcatctgcgggctcagggagtccttatcggcggtagcgttcagcaccgcttcgacgcgatccatcggaatgtcgtgatcgtcatcgtcgtcggaatcagcggattcgtcagaagtggaatcgacggtggtttcctcagcggcatcctgaacggtttcgttgctctcttcaacggcagcggtgtcgtccgtggactgcagatcgttctgatcgtccgcggtggtttcgtgcagctcttcgtcagccatcagcatagtctcctttaataggctaaaagtcataatagtgggtagactcgaaagcggcgaactcacagcgcaaaactgttcataatcagagcaaatgcttaatgggaatcaggaaggtccgcatggcgaagcacaccggcaagcacaccgcgaaacggtcgaaagcggccggagtggcggcattccttgtgctcatgttctccggattcctgctcgccacgaacctgcgcgtgaaccgttccgtcgtggtgaccaacgacaccgccgaactcgtggaacaacgcgtgaaaaaagtcaactccctgcagacggaagtcgacgcgctcagctcccgcgtgaacgatctgagcaaaaccctgaacagccaggacgacgccgaccagcaagacagcgaaagcgccggcaacggcaccatgctgcccgcggtggaaggccccggactcgtggtgacgctcgacgattcgccactctgggaaaacatggtcgattccagcggctccacctccaacatcaacgattacgtggtgcaccagcaagacgtcgaagccgtggtgaacgcgctttgggcgggcggcgcggaatccatgatgatcatggaccagcgtgtgctgttcaattccgcagtgcgctgttccggcaacgtgctgcttttgcagggcaaaaagtattcgccgccattcaccatttccgcgatcggcccggtcgagacaatgaaaaaggcgctcgacaattcgcaggaagtgaccatataccggcagtacgtcagcgcgttcggcttgggatggcaggtcgacgaaaaagaaaaactccatttcgacgcgaccgacgcattgcaacagccgctgcaatacgcgcaggcgatgaacaacgaaacagacggatcgcagcaaacggacgaaacgcaggaatcgcaagaggggaagtaaccgatgaagcacgtggcaccaaaacagcgtcgcaaaagcgtggtctggacgatacttggcatcctcgccgaactcatgctgaccgcggcggccgtctgcgcgctctacatcgcatggcaaatgtggtggacgggcgtgcaggccgaacacaaccaaatcgaaacacgccaatccgtatcatggtccgaccccggccaatccgacagcgtcaccattgcgcaagcgcaggaaggcgacccgccaacgcaaccgcaaagcgcacaggaaggcgagctcatcgcccaggtctacattccgcgattcggcagccaatggcagcgcaacctcgttgaaggcacctctctcaccgaactcaacaagcacggactcggccactacaaggattcgcaaatgcctggccaagtcggcaatttcgccttcgcagggcaccgcaacggctacggacagccactcggcgacgtcgacaaactgcaggaaggcgacccgatcatcgtgcgcacgcaggattactggtacgtctaccactacaccagctacaaaatcgtgctgccgaccgacatcgaagtggtcgccgccaaccccgaaaaccccggcgcgacgccaaccaaacgcatgctgaccatgaccacatgcgaaccgaaatactccacgccgacacaccgctggatcagctacgcggaattctcatactgggcgaaggtgtccgacggcatcccccaggagctcgcctccaccgactccaacggcaaagtcaaattcgtcaacaacgaaaaatcgtcgatcgtcgcatccgtcagctcactcaaaccgtggattctcggcgcgctcgccgcatatgcgatcatcttcctttccgcgctggtggcatggcgttggccgtatctcgccgacgtgcgcgcaggacgccgcgaaaagccggaattcagcttgtacggcggattgatgcgattgcagccgggtgtgcttccgattcgacttgtgctcatggcgttgctgattttcgcggcggccgcatcgtgctttgaatggctgttcccgtgggctgcgacgaatattccggcattgcaggaaatgtcgaattacacggccatataaagctgtattcaggtgccttccggcggtctgctggcagttttgctggcagacgtgaaagcgattgctgcgatctgcgattatcacgattgctgcgattgctgcgtgagacgcgcgccgcgtcacgacatgttgcgcacgtacactgctatgcaaacgcaaatattcgcgcaacgtaagtattcgaagcattcgaacgccgacattccgacgttgataggagcatgatgaccgattccgcacgcattttggtcgtggacaactacgattcgttcgtttacacgattgtcggctatttgaagacgttgggtgccgcggtgacggtggtgcgcaacgatgcgatcgatccgggcgaagccgatgtgatcgacgaatacgacggcgtgcttatttctcccggcccgggcgctccggccgattccggtgccagcgaaggcatgattcgcctgtgcgcggagcagtccaagcccatgttcggcgtgtgcctcggcatgcaggcgctggccgaagtgttcggcgcgaccgtaagccacgcgccgaccatcatgcacggcaaaaccagcttggtggagcatatcgacgatgagatcttcgaaggcgtcgccaatccgatgaccgccactcgctaccattcgctggccgtggagcccgattccgtgccggaagagctggtggtgaccgcgtggacgcaggtcgaccacatcgtgcagggcatcaagcattgcagcaagccgatgtatgcggtgcagttccaccccgaatccgtgatgacgcaggacggctaccgtctgcttgcgaactggctgaaggtgtgcggccaggagaacgccgtggaacgttccaagggattgcagcccaaggtcgcggcctaaggtcgcagcaagaagacgtgggaagtgcgaaaacgcatggtacaagcgtggaaacgtaagtcgcgcaatctcaatcgcaagaaaatacaaaatcgtaagaaaacacgaatcgcaaaagaacataagaccgtaatgaggaaggcccagctggcatttcagctgggccttccttgtgaatgatggcggttatctcgaccgatcagttgccttcgggagtgttgttgcctccgtcggtgttgccgccgttgccgccgttgccgccgttgttgccgttgttgccgttgttgccgttgttgccgccattattggtgctggacgacttcgtggtcaacgtgatcgtggctccgctgtcggactgggtgccggcggtcggtgacatgcctgtgaccgtgccatcctccgggccggaaaccgtgacctggaaaccgtagctttccaacaggctcttggcgtccgcatagcccatgccgaccacgctgggcacgctgatctgctgcttgccggtagacacccaaatcgtgaccgcggtaccggcctcgaccgtgcttccaacacccggctcgacgcgggtgacggcgccggaagcgatagaatcggaatattcgctttcgatggtgatctgcgtcagaccggcctgcttcagctgctcgataaccgtgtctttcggctgtccgatcagattgtcgggaatcttggtcatgccggacgaaatgtacagcgtgatgatcgtgcccttggtctgctttgaatgggcggcaggatccgtgcttaccaccttgtctttttcgatggaggcattgtcgaccgtgcgcacgttacccaccttgaagccggcggcctcaagaatggatttcgcgtcatcctggctcttgttcgacacatccggaacggcgaccgactgagggccggtggagaaccacacggaaaccgtggagcccttggcgaccttcttgccgcccgccggattctgcttggtgatggtgcccttcggctcgcttgaatcggaatcctctcgggcatcgagcttcagacctttggccgcgagctgttcttcgacgcgcgcctcggaaatattcgccgtggcggtgaaatcaggaacttccaccatgtcggcggtggagtcgctcttgttcagcatgaagaacacacccagaatgaccagcagcgccaccagaccgcccaccacggagccgatgatgatctgcttcttcttacgcgccttagcggcctcggcacgctgttccgcgcgggtttttgtggatacgccgttctgtgggttcggcacggcctcgaactggcccgtaacgggattgaacgcctgcgtcgcggcggtttcaccggcaggagtcatggccacggtgttcgcgtccatttcggcctgcttgcgtgccttcatattggtcagatcggtcaacggattgaacgcggccgccatcggcacgccgccgttcatgaacgtcagcaaatcgtttttgaattcggaagccgtggcgtaacggttctgacgatccttcgccatcgccttcgcgcaaatcgaatcccacatcttcggcaagccgggaacgaccgaacttgggggagtggcgacctccgaaacatgctggtaggcgatcgcaaccgcggaatcgccggtaaacggcggccttccggtaagcatttcatacagcacgcaacctgcggaatacaggtcggaacgcatgtcgacgctttcgccgcgtgcctgctcgggagacaggtattgcgcggttccgaccacaccctgcgactgcgtcatcgtggcggcggaatcgtcgagcgcgcgggcgatgccgaagtccatgaccttgaccacgccctgctcggaaatcatgatgttgccgggcttgatgtcgcggtggatgatgcccatgcgatgcgaatactcaagcgcgttgagcacgcccatcatcacctgttcggcgtcgcgctggctcagagcgccattcactttgagaatgtcgcgcaaggtctggcccttgacatattccatcaccagatacggcagatgttcggtctggccggtttccgtggcgacgacctcttcgcccgaatcgtagatgttcacgatattcggattgttcatctgcgccacggaatgggcttcgcgacggaaacgctcaaggaagatcttgtcgttggcgaagtcggcgcgcatgatcttgaccgcgacggtacgcccaaggcgcgtatcgagcgccacgtgcacttcggccatgccgccacggccgatcagttggccgagctggtaacgtccaccagccaaagaggtaggcatgttgatgttcatccctgttccttcccatcagtgctcaaggagatatgaggtctgctgaccacgcgtcgcggaagtcttccgcctgtaggcaccaccatcgtgtcagccaattgtgtctgctggtcgagcagacggcgttcgatgcgggacaacgtgcgcgacaccgtcaacgcgtccttcggacggtcaagcgggtctttggacagcatcgacatgacgaattcacgcagctgcacgtcgacggagtctggcagcggcggaaccggattgttgacatgtgctgcggcgatgtcgaccggcgtggcacccgtgaacggacgatgcccgcacaggccctcgtaggcgacgatgccaagcgaatagatatcggattgaggcgtggcatgctggccctgcgcctgctccggggaaatgtactgtgcggtgcccaccaccatgccgtcctgcgtgatctgctcctgattggtggagtaggagacgccgaaatcggtgattttcacctcgccggaatcggacaccatgatgttcgcaggcttcacgtcgcggtggatcacgccatgcgaatgcgcgacgaacaggccacgcgcggtctggatgagaatcggcagcagacgggtcggctccatcgggccgttctgctcgtggaacaggtcggccagcgacttgctgggcacgtactccataacgaggaagccgatgccgtcatgttcgtaatattcgaacaacgcagcgatattcgggtgtgcaagattggcggaattatgcgcttccgcacgcaggcgaagcagcttggcctcctgcgtgacgcccaagtcgccgcgcaacgccttaatggccacgggacgacccaactggatatcatagcctttccatacttcgcccatgccaccctgggccagacgggcatccaacctgtagcgtcggtggatgagctgtccttcaatcagtttcactctgccagcgcctcctgcatcatcgccttcataatcggacccgccgcgaacgagccatacaaatccacattgtgcaccaccacggcaacagcgatcttcggatcgtccgccggggcgaagccgaccacccagccgtcgatggacgtattgccgtcaccgatctgcgcggtgccggttttcgcagccacctgcacgccgtcgatggccagattcgggttctccttggtgaccaccgactccatcatctgcgtgagcttgttggcggtgcccgaactgaacgcgcggctcatcacctgcggcttggtctgcgaaataacagacaggtcggaggaacgcacgcgatccaccagcgtcggctgcatgaccttgcccccgttcgccacggcggccgccaccagcgcgttctgcagcggagtcaccacggtgtctccttggccgatggacgccaaagcgagcttgtcgtcggtcgtgtcggtcgggaacttcgacgccacgctcatccacggcgtgcccgtggaatcggatccgtcaaccgtgatcggactgtcgaaaccaagcttcttggccatggacgacaccttgtcatcgcccaaagccacgcccagctgggcgaacgcggtgttcgacgaatacgccatcgcgtcttccaacgtgatcttgccgtccgaaccgtcggcctgcgacaccgcgttcgtcaactgtgtgaccgtgcccggaagcgtgtagctcgatccggccggaatctcggtgtcggtctggtattcgccagtttccagcgcggccgccgccaccaccgttttgaacgtggatcccggaggatacagctgcgaggtggcacggttgagcatcggattcgactcgtcttgcgaaagcgtggaataattgccgttcgcttcggacgtgtcgtggctcgccagctggttcgggtcgtagcttggcgtgcttgccatggcgagaatacgaccggttttcacttcgatggccacggccgcgccgtcattgttggcaagaccgttgtaggcggcctgctggattttcggatcaatggacgtttcgatggtcgcgcccttgttttcctggccggtgaacagcgatttgaaccgctgccataccagctggtcggattggcccgacagcagcgagctacgcgacgcttcgataccgttccagccgcgttggctgatcgagaagaagccggtgaccggcgcgtacagttcgccggcggtataggaacgctggtaggagaacgcgtcgttcgaagggtcggatttggcgatgacggagccgtccgaagcgaggatcgcaccgcgcggagcgccatactcgtggtagagggcgcgggtgttgcgcgggtcgttgttgagctggttcgcgcgaatcgccgtgatgatggtggtggacatgcccaggatgacgaacagcgccaccacgatggtgaagagttggcggagtgacttattcatgcttggctcccctctgacatgctgtccgatacgttcggagtgcccgatgggggagcgggtggtacgactggcgtgcctgaaaccggcgtctccgtggagatgatttcagtggcctgcgcggaggcctgcgcggaggccacgcttctgcgggcgcggctctgcttgcgggcgcgcagcgcctgcatcgcctcatattggaacgtgtcgctatcgatatcggattcgggtttgttcgccgagttggaaatcaccactaggagtgctgccaacatgtaattcgctatgagtgaggatccgccggcggccatgtacggaagagtcaaacccgtaagtgggatgactaacgtgatgcctcccaccacggtgaacacctggaaggccatggtgaacacgaggcccgatgcgagaagcttgccgaacccatccttgattttcatcgcagtgatcatcccggcggcgatgatgagcagatagagcatcagaatggccatcagaccggtgaggcccagctcttcgccaagtgccgcgtagatgtagtcggagttggcgatcggagtgagcgacgggtgaccttgcccaaggccggtgcccatcaagccgcctgatgccaggccgaaaatacccgtgacgagctggtaggatccgccgtactccttgttgtactgcgccgagtcgaacgggtgcagccaggcgtcgacgcgcgcgccgacatggctgaaaatattggccgcggcgaacgcgcccacggcgaacgcgatgaaaccaatcacaatccaactggtgcgccccgtggccacgtacaacatggacacgaacatggcgaagaacatcaacgacgtgcccaaatcatgctgcacgaccagcacgcccatcgacacgatccacaccacgatgataggcccaagatccttgatgcgcggcagctgcaggcccagcaccttcttgccaccgaccgccagctggtcgcggtggtcatacaggtaggaggcgaagaaaaacgcgaggaacagcttcgcgaactcgcttggctggaacgatcccaaaccgggaatcttcacccaaatgcgcgcgccatattgttcggaaccgatcaccggaagcatcggtgacagcagcaacaccaaaccgatcaccatgctgacgtacgagaaccgcctcagcacacggtaatccttcatgaagatcaccagcagattcgccaaaaccagcgctatcgacagccaaagcaactgtttgaacgcgacggacgtgttcgaatcctggtcgatgcgggcgatcatcatgatgccggtgccagtcagcaccatcacacaacacatgatcgcctggttggcatacggctggaaacgcagcggcaatccccaggaagtcaggaacaatgcgccgacaaaagcgagcatccacaaataattctgcggaaaaccgccggtggtgcgttcgaacatctggaagaacgcgacgccgcaaatcagcatgctgaacagcagcaggccgaattgcttcagacgggttgccatcatgactggtcaccgcctgacttgtttgccgaagcgtcgtccgatttgtctgatttgcccgacgacttgtcggaagtcgtaccagaggatttgttgtcggattcgccgtttgccttgtcttgttccttctgcgcggcttcgtcctgctgttgcttcagctgctttttgatcagtcgcgtatgcgttttcgcctcgccgtacgtgtcgaaggaaatgccctgcgcaagctgttcctgccagcttggcggcagttcgctcgtcttcatatgggtgtcggtgacggcgtgcgacagctggaagccgaacaggcttgtcggcacgccttggaaaatcgccacttcgccgttgtcgtcgccgatgtagtacttggtttggctccaacggtaggttgcgaacgcgccgcccgccagtcccagcagtaccacgatggtgacgatgatggcgatcacacggttgcgtcgggtgcgcgtgcgcttcgttttgcgctgctcgatatgctcgttgcggatggctttggcgacttccggatcgttcggatcggcggaaatgcggccgtcgtccttctgtacgacggggatttcaccggtgtcgggattggtgcggtcgccgttctcctcgcgtaccgtggacggttgcgccacgcgctgttccggaggattgtcgtcctcgttgggattcttgccgttgcgcagtgcggcggcacgggcggccggcgacttcttgccctcgcgcagtgcgggagcggatgcgaccggctcgttgatgatgtcggcgatcggttcaaggcttgcgctggccgcgccgccaaccaatggcgtctgatgcggcagatcgaacgcgtccgcgtcaagggcgagcgtcgcgtcggcgatgaccgcggtgacgttgtcggtgctgccggcacgaagcgccatcgaaaccagctgttgcgcgcactcctcctgatcggagcagacggacagcacctcctgcaatgtggaatcctcaagcacgccgcacaaaccgtcggagcagagcagccagcggtcggccggatgtgccttgcgtatggcgatgtccggactcgaatcgatatcgaaatcacccagaacgcgcatcacgacgttgcgctgcggatggttgcgcgcctcggcctcgctgatgcggccggtgtcgatcagatgctgcacgtagctgtggtcggacgtcatgcggatcagacggccgtcatgcagcagatatgcgcgggaatcgccgatatgcgccaaaacccaatatccggccaccaatgcgaccgacgtgacggtggtgcccatgcccgcgagacgacgttcgcgcttcgctttgccaacgatcgcgtcatgcgcggccataaccgaggtttccatcatgtgggcgataatctggacatcgccctgcacgttgtcttgctcgatatgcgccaatgaacggatggcgatggtggaggcggtgtcgcctcccgcatggcctcccatgccatcgcagatggcgatcagatgctcgccggcgaacgcggaatcctggttgttggaacgtacggtacccacatcggaaacgacggtggaatacatgaacagcggttgtgaagcgggagaagtcggcaaacgggtcacctcaattcaaaggtggttgcgccaatgcgtacgggaacgcgcgatccgagaatcatcggagcgttcagacgctgctggttgaccacagtgccgttggtggaacccaggtcttcgatggcccacttgccggtggcgggatccgtatagacgcgcgcatggtgggacgagacgaattcgtcgtccagaaccacggtgttcgaagcggaacggccaagcgtgatggtgttgccggacaaagggacggaactgccggcaagggggccatcgatgatgaccagcaaggtgggtttggcgcttgatgtggcgctgacgactggtgccgggacggccacgggcgcgggcgcttcgacggccttgcgcgcgcgacgctccttacggcgatgagcccgcgacttgcgcgggctgagcgtttccacatccctgtacagcgaacgcaccgtacaggccacgaagatccagagcagtacgaggaagccgtacttgaggatcgcgaaagtaagttcagtgagcatagaggcaactcccgaggttggggttggttactcctgatcctgcgaagaggcccaatacaggattcgggtgcggccgatggtgatcgtgttgccgtcgagcaacgtggccgcctcgacatgatggccttcgacatacatgccgttggtggagcccagatcgcgtgcgatgacggtgttgccgttgtcggtgatgtcgatctgcatgtggcggcgggagatgcccggatcgtcgatcacgatatcgcagtcggatccgcggccgatgatggtcttgctttccgtgagcagatactggtgttcgccgatttccagcatcgggcagtcttcggtctgcgcgtcggtggtgacgggcacggtattgccttgcacggattcgctcgtcagcttgaaattgctcttggtgaggtcaaggtcctcttcgaagatcaccacgaccggaccgacgaacgcgtaatgctggtccttcgcgtactgggtgaggttgtcggccagctcattggccaacgcttccgcgccccattcgacgatgttgttgaaatccggcgtgctcagcttgaaacggtactcattcggcgccacggtacggtctcgcgtgacgggcatggcctctttgtcaatctcacgttccagagcgctggaaaggtcgacgggctgcaggtccttggacccgaacttggcgaaaaccccgttgacggcgccttccacgcttttctcaaatcggtcgagaacactcatgcttgtccctttctatcctcacccatcctacgcggtagagcgccgagcgccaattcgtaagtcctttaattgcaaaaaattcatgcataaatccatccccagcatcatttagggggtatttatccgcgaatatgactaccttcgcccccgatttccacgatgcacgaattcacggaaggtggaattgggatggtgataggttgggagcatgacagatgcgattcgacagttcccccgtaaaaaagcacgtaccttgcgattttcctgcggcgctccgcgttcggcgcgcgtgattgcagacggctcccgcgcgctgttcctgcgttccgacggtccggaagacaccgtcacctcgctgtggatgagcgtgatcgacgaagacggcaacatcggtgagattccgctcgccgatccgcgcgtattgcttgccgacgccgacgcggaagacgttccggcggaagagaaggcgcgacgcgaacgtgcgcgcgaaggcggatccggcatcgtctcgtattgcgtcgacggtgccggcaaccgcgtgaccttcaccatcaacgggcagcttttcctcaccgaccttacggcgggcgcgacgcgagccatcacgatagaggaagatgaactcaaaccggtgctgaacccgcgcatcagtcccgacggacggcacatcatgtacaccaccggcacgtatctggtggacgtggatctcgccaacgatgaagaaaccggcgatgcgatttcggtggtcgcctcggcaccgcagaacggcgaatggaaaatcggattggcggaattcgccgcaggcgaagaaatggaccgctacgacggcttctggtggtcacccgactccaaatacgtgctcttcgaaacctacgacgaatcccccgaaccgatctggcatctgtcggaccccgcgaatccaaccaatccggcgcaagccaaccgctatccgcaagcgttgaccgccaatgccgacgtgcggctgaccctgctggaactcggctacgacagcgacaactgctgctacggggcaatcgccaacgaagtgcagtgggaccatgaatcctacgaatatccggccgccgtaagctggcgtgaaggccacgatccgatcatccttgtgcaagaccgcctccagcagcacgatcaggtgctcgccatccatgtaggcgagccgatcgtcaccatgcgtgacgcggaaaacggcttcaccgacgacaatggcgacgaggtcggaaccttctccatagccattcccgaatacgcggaaggagaacgccccggcaccacgcgcgtgcttgaggaacacggcaacgactactggctcgacctcatccacggcacccctgcattcactccggatggacgcttgatctgcgcgatgaacgacatggacgtcgatacgaaccgactcaccgttgatggtacgcccttcactccggccggactgcaggtgcgcgaagtgctcgacgtgaccgacgacgacgtgctgtgcgtggtacagcgcacccctgaaatcctgcctgaaagcgacctgccgttcctctggcagtcgaatgcctccgaccatgacgcccgcagcttcgacgtggtgtcgatccgctatgacggcacatgggaacccctcacctacgcgcccggccagtggagcatgtctcgcgccggcaacggctgcgtggtgaccggacggggcatggacgacgcaaccgtgcaaatgcagcattgcatgaacatcgccacaaccgacgaaaatggtacggacgtggcgtcaatggtggtcgcaccaatcgaaaaccatgccgaaacccccggattcacgccgaacgtgcacttcacccgactcggcgaacgtgagctgtacacggcgatcgtgctgccctcatccgatagtgaatacgcgcacgaagccatcctgccggtactcatgaaaccctacggaggccccggcttccaacaggtcatcgaaagtcaatccttctattgggacgcgcaatggtgggccgaccaaggctacatcgtggtcaccaccgacggacgcggcaccaccggacgcggcccgcaatgggaccgcgccatctacgaaaccatgaaatccgcaacgctcgaagaccagatcgacgccgtgcgcgcgctgccggaagcgttggaagcgctggctggcgagaatgcggcagccaacgttccgcaacccgatctcagccgcgtcgccatgatcggctggtcgtacggcggattcctctccgcgctcgccgtgttggaggcgccggaaacgttcgccgcggcctgcgcgggcgcgcctccgaccgactggacgctgtacgacacgcattacaccgaacgctatctcggccttgacccggccgtgtacgaacgcaacagcatcatcgccgacgcgccgcagcttgatcgcccgctcatgctcatccacgggttcgccgacgacaatgtgacgatcgcgcacagcctgcgcctgagccaggcgctgatggcaaccggacgtaagcacacgttcctgccgctgaccggcatcacgcacatgaccaacgacgagacggttgccgaaaatctgctgatcctgcagcgcgatttccttgcggaagcgttggggtgacggcaccgtgacgacagtgcagtaacggtaacggcaacatcgcaaacgaaagtgctgcaaagcgccgtaggaagacaaaacgcgttcccctgcgattcccggactgccaagcatccgaacgtcgtgggcgaacgcgttcccttctcgaatgccaacataaaacaggcgaaacgacttcgcaagcgagggggtaccacatttgtgtacccccccccaaaaaaaaatctgggcttgaaaaagacggaaatcggtggatcgggctcgtcccaaccctgatccgcagctatagtcaaacctgcacttgttcaagcaaaccgggcgaatcgtcgatgacggtcaccggaatgtacgcaaacaacgtccaactgccgtcctgcgcagacgtggtgagcgtgccctgatacgattcgagctgcttcttgaacgaggcgagcccgtggccgcccggtagttcgtcatcgcgctcgtcagctccagccatgtcctctttcatgggattgatttgcgtgatttcgatggcattcggccggagcatcaccgaaagatcgaccttgcttcccggagcggcatggcgtgcgatattcgcatagatctcgcgcagcagattattggcaagttcggcgattgcttgcgatgcgctcggcttgccgcccgcgcagtgccggatggacgtgatattgaagccaagcttgcgcaagcgacgatcgccgtcatccagtgttgctcgcagcagattggccaacgcttcgccgtcggcgtcgccggggagagtagtggcgtccatattcaattcgtcgatgacgcgatgcacgttcgtcaatgcggaaagaatatattcgttgatttgacgccagtcttcggcatcggctgttgtggttgccgtagttgtggttgcgttggcagggtcagcagcgacgccagggccgctagagttgccaccgatatgccgttgcgccacaaacgacgctgctgacaaatcgcccgtcaccgcatcgtgaatggcatcggcaatgcgtgcgcggctttccaattcctgcagacgattcttgttctgcgccgcttcgaagcttttctgcgttgttttttcgctccaactcaacgtccgaccaagcagtagcaccatggcatacatgctgaccatggcgacggggttggtatttgggtcaggggggtcaatcagcagaatgttaacaacgtaatatgtgagtaacgttgccacgataatggcattagtgctgtatgcgagcatgccataggcgtaaagctgcgcgggaagagaatttcccaaatgcgcgtagggagtaaacagatcgcctatggaggcaatcacgagaatcgccaccgatgtacttttcagaaacagcggagacagtacgagcgccgtaaccagcatcgcaacccatatcacgccaaatatgtcggtaggaggctcgtagcaaacgccgtatatggtccatgcaagcacgatcagcataatggcgaaacggattggatgccacaggttcggatgctgcgtgcgcatacggttgcgccacgcaatgtactgagttgcgggtttagagcgcattggacctcacccacagtgccactgcctgacgcgaggtcttgcagttgagttttcttaaaatactttgcatatgtttgcggatggtggcttcggaaatccccaaacgctcggcgatgtcccggtcaagcatgccctccgcgcacaaggaaataatctgctcctcacgaacggtaagcgcgggagtggtctcagcctccctgctgatacgcagattggccaacgcaggcggctcaaatccctccatcacctcgccattgcacatacgcataataatctgcgccaactggtcggcattctccttaccaaccaacccttgcgcaccagcctcaaccagcttgtcccgataactattgatggaaaaactggttgcaccgagaatcggcatgcgctggtccatcaaacgcaaccgacgacacgtggcggggccttgcaattcctccatcgacatatcgagaatcaacaaactgacatggccgttcgcatcctggcaacgttctatcgcctcacagcctgaagtcgccgtccacaccacatacgcggtcggcactttgctggcaatgacggcactgagcgaatccagcgctcgcggatcattgtcgaccagcgcgatgcggtgaatcttgggatgcttttcccgcgtggacatcatgcgatcactttccttttccgcacagccattgcagccatgttgggcagttggaatcttgggcagcggagatatcaccgttgttgtcaacgggagttgccgccgcgtacgcatacgttggtgtgccggtgagagacagcgttaccaccatcagcagtgaaacgaacttcatacctccatagtatgcgaggatggcgcgcgggggtgacgattcggttgttccggtacgccgttgatgcactgacgcatcgttatacagcgcgtatgcctgtgcttagtttcgtcttggcgccgttcgcctaagatggaaccatgactatcacgctcatcgacgaggcgcgctatgacgccgaaatggacgctacggtgctgcctgcgctgcaggcttgcatgacggaaggttggatggaaccggccaccgtcgattgggaaggcaaggcgttgcccaagttggagcgccccggccggttgcattactaccgctacgacgcgcgcacattcgacgcgttgcgcgaggaaggcgcttcgggcgtatttcgtggcacggtcgtcatttcgcacggattcaccgaattcggacgcaaatacagcgaaatggtgtggtactttctgttggccggctattcggtgtgcgtgttcgagcatcgcgggcatggccattccgcgcacgatatgagcaatccaagtttggtatggattgacgattggcggcgatatgtggccgatttcgccacgtttgcacagactgtggggcgtgaggcggcggatggtggcccaatgtacctgtactgccattccatgggcggcggcatcggcgcggccgcgctggaacgttacccgtcgctgttcgacaaggcggtgctgtccgcgccgatgatcgcgccggtggtcggcatgccgacgtgggccgcacgcattgtggtcggcgtaatctgcgggcttggcttcggcaaatcgcgtgtgttcgggcatgccgatttcgacggcaacctcaatctcgacgactaccgcggggcctcggaggcacgcatccgctggttccacaagcaacgtttggcggacgtgacgtgccagaccaacgcggccacgttcgattgggcaaaccaggcgatggcgctttcccgagccgtgctcaaacctgacatgtgtggagctatcgaagctccggtattgctattccaagccggacgcgacgtgtgggtgctcaacggaccacaagatgacttcgtcgaacgtgtgcgagaaggcggcggttccatcgaaaaagtgcgatacagccagtcattgcacgaaattttctccatgccgaatgctgtgctcggatcatatcttggcaaaatcctcgattttttgtcagcgccgaacgcaagcttggcggaataaatctgttttgcataactgacgtttaatatgcgtaccgtgtgcgttacaatcgccgtgaatttgccgtgaaagccgtggagagagcgaggacaggccgtggcaaagcaaacgtcgggacaggcgtcgcaatcgcagaaaacttccgaatcgcaaaaaaccgcgaaaaaaactacgaaaaaaacggaacatgtgctggaacagacgccgaaaagcctgctcatcggcactggcatgacattgctgggcggtgccatgtggggtatgaacagcaccgtggccaaactgctgatgcgcgactaccagctggatccgatctggctttcctgcgtacgcgcgctattcgccagcctgatcttcctggtcggatcggccatcaccacaccgcagaaactcgccggagcggtcaaagacgtcaaatcgtatccgaaatatctggtcacgacactgatctgcgtgcttctggtgcaggtctcctacctgatgaccatcgactggacgaactccggaaccgccaccgtattgcagacgctcaacctgatcttcgtgctcgcctgggtatgcctgcgcggcaaacgactgcccctcaagcgtgaattggtcggcgtgctcctggcgttcgcaggcacgttcctcatcgccaccggcggcaacttcgcctcgctgtcgttgccatggcaggggctcgcatggggactggttgacgcggtgagcaccgcggccatgtccatcctgccggtcgtgctcatgctcaaatggggcaacatgaccatcaacggcatcacattcctcatgtccggactcatattatgcccgttcgcgcaaccgtgggcgaacattcccgcactggacgcgcgaggcgtgcttctgctgctctacaccatcgtatgcggcacgttcctcgcgttctggctctacatggcaggcgtaatgcgcgtcggcgcggtgcgtgccaccatgctcggcaccagcgaaccggtcatggccaccatcaccgcagtggcatgggccggcgaaacgttcaccttcaccgacctgaccggcttcgccatgatcatcatcatggtcttcctcgtgcgctgaccgctcgccatagccataaactgtccgattctggagaatcggacatccagaacgcaaaacccataccttagttgtccgattcaccagaaacggacacttatggtgcgcacgtcggtgccggcgagcacgtcggccagatgcttggcagtgttcgggattgccggcagagtctcttcggtccaagcgccgaccgcgttcacgaccacggcgaatactcgctgactgaagtcggcgaaagcctgcgcccgatcatcgatgcgatgaagacatgggggaaccattaccgaaacgaacacgagttctgattgttccagtcactggagttgtcgggagccgctgagctctactgccgcttgggaaacgaaaaggccggaacctttcggctccgacctttcaccatggtgcgagcggggggagttgaacccccacgagcatacactcactgccacctgaagacagcgcgtctaccattccgccacgctcgcagacaatcgactaatctacaccaaaacctgcgcaacctcaaatcggcgtgtcgcgccgccattttccgtaggaaaattcaagcgacgcgacgcgaggagggaggaagccctgtgggcttccgtacgacggagccatccttaatttcgccattttccgtaggaaaattcaagcggcgcgacgctctgtgtgcccgattctggcgtttcggacatccagcgagtgtttttaggttgcttacttgtccgtttctccagaatcggacaagtagaacgtgagataagcattgtggttgtccgtttcgcccgaatcggacatgtagggcatgaaacatgtggtgtggttgtccgtttctccagaatcggacacatctggtgacaagtctgagaacgagacggcgagtgcgggctcgccatgcatgaaaaggcgccgacgggtttgttcgtcggcgccttggaatgcggaagtatggctcagcattcgtttgggtggaaggcccaagtgaaatgcatcatccgcgggaaccgttggcgtagaagcgggccagggtttcgtcgcggaattcgtcgaaatatccgccgtcaatcgacgtgcgaatatcgtccagcagcttcacgaagaaatgctcgttgtggatcgtcgccaatgtgaaaccgttgaattcgcgggcacgcaacgcatgatccacgtaagcgcgcgaataatgcgtgcatgtgtagcaatcgcagccctcttcaagtggaccaaaatcatgcttgaattgcgcgcgcttgatgttgtaacgtccgccgcgcgtgaaaatcgcgccatttcggccgcaacgcgccggtgcgacgcaatcgaacgtgtctccaccattctcgacgcatgcgaaaatatcgtcgactgcggcgatgccgagcacgtggcgcggtcggctttccggcatcgcatcgcaaatccaggcgcaagtgtcgccgataatgcgcttctcgatcgcacctccaataccgacgccgtcgaaatccaacgaagcgatctgttcggccgcatgcctgcgcaaatcctcataattcgcgccctgtaccacgccatacagcgcctgatacggcttgccgacgcgctcttcggtaagtctcttatgctcggcaacgcaacgctgcgcccaacggtaggtgcgttccacggaacgctcctggtagccgcgcgtgttcatcagtgtggtcagctcgtcgaacgcgaacatgatgtcggcgccgatcttatgctggattcccattgaaatttcggcggaaaaacggtgcagtgagccgttgagcggcgatttgaacgttacaccgtcctcgtccacgaacgcgagacgctccttgccttcggcgatcacgtcgtctgatttcatgccggtcacgtccatggcgagggttttcttgaagcctgcgccgagcgaaagcacttggaaaccgccggaatcagtgaaggtcggaccgttccagttcatgaatttggcaaggccgccggcttcgtcgagcacttgttcgccggggcgttcatacaggtgaaacgcgttggacagcaggcattgcgcgccgagatccttcatggtttcgggcagaacggctttcatcgcggcctgcgtggccacgggcacgaacgctggagtgtgaatatcgccgtggggggtgtgaatgatgccggtgcgaccatatcgtgcgccgcctcgccccttaccgtccgccgcgtcgggaaggcggtttttctgttcgaaatagaaggcgtcgcggcggcccggcttgcctggttccgctccacgcggatgttcgatgagattttcggacactgcggttgccgcgttttgcgtgtcttgcgctgtgtcggtagatgattcggtaaggcttgtcatgcggaatattttatgcgatagcggcgattcttgaaagtgctgcaaagaatgcgatcggtgaaatgaaaacaaggaagatgtggaaagtgcgatgaaggtgccgatcgcattttggtgcgattttcagattcaatggtgatgttgaacgtatttggctgctactttcaacaaacattcaggaaacttccagagcgagtatctttactcatagatagcagttcgagcggcacgattgctgatttgtgaaatgccgcgggacgaataaggagcgaaaatggctgaagagaacgaccagaacgccgtgcagccgcagaatgacgaacaacagaccgtgccgatgccgtcggttgatgcggaacagacgcaaacttacgcaggtgagccgtatgctgcagagtcggctaccgaaccgattgacgtgcagggcggtattgaggatcagccgacggccgccatgcctgttgcgaacgatggcgcttcggcggaatccgcggctgcggcgggcaatacgccggattatgcttccgcggcgggcgaacgtaccgtggttggcggttccacgcaggatgcgccggcccagcagtaccgtccggcaccggaatatggtgcgtacggtcccgtgccgacgcagccggctgatggcaccgcagccgcgaacgatactgcgaatggtgcgccgaacatgcctccgcagccgcaatatggcgcgtacgggcaggcttccggacagcagccgcagcagcctcgcaatcctttcttcgggaatccgtatgtgggtggaaatcagcagaacgatcagcagaatacgcaatcgaataacggcaatccattcatgaagcccgctgcgcaaggcggagccaacgtgccgccagcagcgccgaatactcccaataacggcaacccgtttgggaatccgaataacggtaatccgttcggtgccccgcagcagaatggcgcagcaaccaagccgaagtccgcttccggcgtgaccgggcatgtgatgaccggcgtggtggcggccctcgtctccgcggcattgtgcctcggcgtcggctacgcggcaatcaccaatggatgggtgaccgtacccacctccagctcactgaccagcgtgaagtccaacacgtccggatccggttcggcgaaagccaaatccggcgaggccgcggactggagcgcggtggcgaaagaagtgtccgattctgtggtgtccattgacgtggcaaccagcgacggcagcgccaaaggctccggtgcaatcatcagcgacaaaggctacatcgtcaccaacaaccatgtgatttccggcgcgaagcagattcaagtgacgctcgccaacggcaccatctactcagcgcaaatcgtcggcaccgacaccaccaccgatctggccgtaatcaaactcgacaatccgccgagcaatctgaaagccgcggaatttgccgattccgacaatcttgccgtgggtgaatccgtgatggccatcggcaatccgctcggctacgatgacaccgcaaccgtcggcatcgtttccgcgctcaaccgcccggtgaccgtgtccgatgacaacaacaacgacatcgtcaccaacgccgtgcagattgacgcggccgtcaacccaggcaattccggcggtccgaccttcaatgcggccggccaggtgatcggcatcaactcatccatcgcatccaccacaacgtcttccggcaccgccggatccatcggcatcggcttcgccattccgtcgaacctggtaaagcgtgtggctaacgagatcatcgacaacggcaccgtgcagcacgtggcgctcggcgtcaccatcaagagctctacggttgaggcggacggcgtgacccgcggttgcacgcaggtgcagtccgtggtcgacaacagcccggcggccaaggccggagtgaaggccggcgactccatcgtggcgttcaacggcaaggcggtgaacaacaactattcgctgctcggctacgtgcgcgcctccgccatgaacgacaaggtgacattgacggtcgtgcgcgacggcaacaccatggagcttgacgtgacactcgaccaggaggaatcccaaacgaactcctccaacagccagaaccagcagaacaacggcaatgatggccagagccagaacggcaacggcaacggcaacggtaacgatggtaacggcggcaacggcaatggaaatggacagagcgacggcaatggtagcaacggctacggtgacggaggcggcctgttcgacccgttcggtctgtggtaaagcacgacggaccgccgcggttggccgtggatggctgcggtcggctgcggcgggctgcaataagggtgatgaccacccgataggctgacggcgaagacgcgactggagttgcttaatcgcaagaacgtcttgtgaacgtcatcgcgagaacgttaaaaccgcggaaaaccaataaaagttaaaagcagaagcaggactgtgcgaacaatcgtacagtcctgcttttctatttttggcaattgcgacacgaaaatcgcagatgtttgctatgctggaaatatctttttacgccgtgtatcgatggctcgcgcgggcgaggcgccgatgggttaacaaggcgtccgatacgagcgtaaggagattctcatgcatagaatcatcgatatttgctggcgactgtgcaggcaggttccgttattgccgatcaccattctggccgcgattccgttggcattgctgggggagtggaggccgtggggcgaggctgcgtgggtttctcacgatttgcatgctggctttggttggctgagcgcgtttaatccgggtgttggacagtggatagtgatcgcgctggtcgcatacacgattgtggtgacggtgcgtggcatgatcgacgatctgcggcacggccatgttggcgttgatctgctggcggtcgttgcgattgcgtcgacggttgcagtgcaggagtattgggccgcttgggccgtggtgctgatgatctcatccggcgaggcgatcgaggaattcgcacagtcgaaggccgaaagcaacctgactgcgctgattgacgctgcgccccgaaccgcgcacgtggttgcgttgccgggagtgcgcgggcatgtgcatgcgacgggcggcgagcatacggccgacgtgacagccgacggattccgtgccgtcagaatgtccgattctgcagaaacggacaaccaagacggtggaaagcatgattatgtgtccgaatctccagaatcggacacaaaagatgcttcgcaaacgtatgatgcggctggcgagcgcttcgaaacgatccccgtcgatcaagtgcggctcggcgacgtgattctggttctgccgggcgaaacagtgcctgtcgacggcgagttgctgtcgggtgtggccacgctggatctgagcaacatcaacggcgagcctgtgccgcgtgaagtgtatgcgggcgctcgcgtgatgtctggtgcagtcaatggctcgaccacgttgaccatgcgtgccacgcaacttgcgcaggattcgcagtatcagaagattctcgagctggtttcgtcggcgcaagagtcgcgccccgctgtcgtgaagaccgcggatatgcttgcagtgccgtttaccgtgctttcgcttgcgattgctgggattgcatgggcggtttccggattgccgctgcgatttgcgcaggtgctggttctcgccacgccttgtccacttctgattgccgcaccggttgcgtatgtggctggaacagggcgtcttgccaaagcgggaatcttgattaaagcacaggacgtgttggaaaatctaggtcgcgtatcgcatattttcttcgataaaaccggcacgcttaccgtcaagcaaccgcaggtcgtgcgcgtggagaagccgttcgaaacgagttcgccgttcaatgaagaccatattctcatgatggccggtgtggtggaaagttactcggtgcacattctgtcgaaaggcattgcggcggccgggcgcaaggctatggatgatttgtatgcgcggtatgcggcggggcagaggctgtgcgtcgagcgcgatttgccggggcacgggcgcgactatccggtggtgaagaacattgtagaggagtccggcaagggtatatccggcgaagtgaacgggcatcaggtgcgcgtggggcggttcgcatacgtgacggctgacgaatccggattcacgccggtgctgcatatgccggatgcgacgtattacgtgtccgattctgccgaatcggacaaacgggagactcagaatgcgctgcggatgtccgattcaccagaaacggacatccagagggctaaaacgcgtgcttacttgtccgattctccagaatcggacactatgggagtgaggaacggggtgcctgacgatgcgcagcctgcagccgcgccctctacttccgcgtccgtcgcaacccaatccgccgctcgcaagcctgaaaccgcaaactcgctgtttgccccgctcgctcctgacgaaatggctgcatacgtggcgattgacggccgtcttgccgcccgcatcgtacttcgtgacgtgcctcgcgagaatgcgaagcgttctttgactcgcctgcacgagttgggtgtcaaagaactgtccatgcttaccggcgacaaggctgcgtccgcccgcatcatcgcaaacgaagtcggtatcgacgacgtgcagtccgaactgttccctgaagacaaggttgccgccgtcaagagcaccactgaatccaagcaccagaagctgtcgttgtggaatcgcatcaagcaacgcgtaaccggcgaatccaagaatcgtcaaatcaccatgatggtcggtgacggcgtcaacgacgcccccgtacttgcggttgccgatatcggcatggctatgaccgacggcacgtccaccgcggcttccgaatctgcgcaagtggtcatcatgaatgacgacattgcgtccgttccgcgggccatcgccatcgcgcgccgcacgaaaaaggtgatgttgcaggcggtgctgatcggcctcggccttgcgattatcggcatgatcgcggccgcgttcaatctgattcccgtggttgtcggcgcgttcatgcaggaagcgattgatgttgtcagcattctgtgggcgctcaccgtgcttttcgaccgtggcgaatcagcctgattgcgcctcgaaaccccgtatctcgcctatatatggcagatttggaggtctgtcagcaagtatttcgtttatatctggcaggtccatatgagaaaaccggacttaaggggtgggaatacaccctctaagtccggtttctcaaaacagctctgccatatataacgtagatagctccggacgaacttcggaatctgccatacataaggcagattcggaagttttgggattgtctacagcgagctcggggagatttctccagcgatcgatgtgtgcatccacttgccgaagtcggctccggtcacgccttgagacagcaggaacatgattttcgcatacgtggcttccagcgtcatatcgccagatccaattgcgccggcgcgtgcgatcgcatcacccgtctcgtaatggccgagcagtacttccgcctgctggcactgcgatgcaatcacaacgggaacgccatcatgcagcacgtcggcaatcacgtcagtcagtccaggctcgtcgcttggcacattgccgacgccgtacgcacgcaacaaaaccgcttccggccgcggcgtaagcatcgcttccaaccgtgccgcggaaatgccgggtgccatatcgatcaccgcaacatcatggcgagagtaaggctgaggcgacgtccaaccgcagccaaccgcagcggaatcgcccgcataccaatgccatggcgtgccagtgcgtgccagcgggccgacggaaggcgccgaaaaaccttcaaatgcccagctcgacgacttgctcacacgattgcccgcaaacaggtgatgtccaaaaaacagtcccacaccgtggaatcgtccgctcatcgcggcattcagcgcgcccgtgacattcgcagtggcgtccgactcgatcttgccaagcggatgctgtgaacccgtgaaaatcaccggcttgccaaaatcagccaacgcatacgcaagcgcggcgctcgaatagctcatcgtatcggtgccatgcaacaccacgaacgcgtcggcatcatcgcggtgcgcacgcaaatcgtcgaccatcgtctgccaattgtcgggagtcgcattcgacgagtcgataagaggatcaagttcggtgaacgtgaacaggctcgcgtccatgtgcgcgtcctccagcagacggaacagccatccgcgagtgtcggcgcccggaatcaggccgttcggcgagtcaatcatgccgatagtgccgccggtatatgtgatgtgaatgcgcattgccaccttcttacgattgcctggtacttaataagtacttgcttgcgattctgcgattacttgaattacttgcgattgtacgtgcgcctgccgtacgttgttgcgtgcgattggtgcaggcgcacgttggatgagtttggctggattcgacctgatctgacctgatttagtgagatccggccaaatccagctgaactgcgatttcgtgactacttgcccggcacttccgtggtttcaagcacgtcaggcacgtcgttgccattgtcgtcgagcatttcgtccatcagatcgccgttgatgcggccgcgcacgtagaaccagcccgcaaccatggcgatgatcaccaccacgaacatggcgagcgtccaacggccggcagcgctgttgagattcgacagcacaacaaccgcgaagaagatgagcgaaatataattcgtgtacggagcgcccggcatgcgatagtcaggacgagtttcctcgccagccttcaccttctttaggaacgcgagatgcgtgaccagaatggccgcccacgttccggcaatgccaatacctgccagattcatgacgatttcaaacgcgtcggcaggaagtaccgcgttcatcaccacgccgatcaggccaagtgcggacgtgatgataatgccaccatacggcacatgatgcttgttcatacgtgcggcgaacttcggaccagatccggccacagccagcgaacgcaacgtacgaccagtggaatacaggccagcattcagggaggaaagcgccgcggtgagcaccacaacctgaatcacatcgccggcatgcggaatgccaatgccggagaagaacgtgacgaacggggactcattcgacgagtaggcggcgtatggcagcaccagcgccataagcaccacggaacccacatagaacacgaaaatgcgaataatcatcgaattaatggccttcggcagcaccttttcggcatccttcgcctcaccggctgccacgccaaccatttcagtgccgccgaatgcgaacaccacgccaagcgtcagcgcgaacaccggagcgataccattcgggaacagaccgccattgtcggtgatattcgcaacaccggcgtgcgcgtcgccaaccggagcgcccgtaacaatcgcccaaatcgcaataaccatgaacgcgataatcgtggccaccttaatggcggcaaaccagaattccgcctcgccgaacatcttcacactcagcagattcagcacaaataccaatgccagcgcgcacaaggcgatcagccattgcggcaccccctggaacgccttccaatagtggaaatacacggcaacagcggtgatatcagccataaccgtaacggaccagtccaagaagaacagccagccggtcacatatgcgcccttctcacccaagaattcgcgggcatacgatacgaacgcgcccgacgatggacggcgaatcgcaagctcacccaacgcgcgaaccatcaggaacgcgaaaataccgcacaccgcgtatgcgatcgcaagacctgcgccaccctgcgcaagacggccaccagcgcccaaaaacaggccggtgccaatagaaccgccaatcgcgatcatctgaatatgacgcggcttcaaatccttcgcatagcccgcgtcacttttatcctgcttctgcgcagacgactgctgcgtcgcgcttggcgaggtattggaattactcatagtaatagttcttttctctatttcctctggttttcttttatttatttcgactgcagcgtcgcaattttccgacggaactattgtacgaaagtcgttccgcgaagctgttccggcgaagcggtttcgcgaaagctggccgcaccgacgtcataattgctacccctgtgtgaatgccgcatacattatatggacggctctttaccgtttgttgacattccgctcatagtgcgtcagtggccacggtccgtgcccctcttccaacgccaggttgtccgattctgcagaataggacaaccaaacacgtgttttgattccggatgtccgattctggagaaacggacatccaaacgtacgttttggtgccttgcgtgtccgattctggagaaacggacaaaaagacgtacatttcggtactctgaatgtccgattctgcagaatcggacaaacgagacaaccgagacgtgacggaaacgacatgacggatgggcatacgtgagcaattccaaaggacgaaaccggaaggcgaggcgaagaagtcgtaagaaagtacatgagcgcccctgttgcaaatgcagggaatgcattaggctagagcgcgtgactgaaactcatgaacttcgtattgctgtaatcggcgccggccctgcaggcgtctactcctctgacattttcctgcgccagttgaagaagctcggcgaggagctcggcctcggcactgccgcccgaatcgacctgttcgaaaagctgccggtgccgttcggtctggtgcgctacggcgtggcccccgatcatccgtccatcaaattcatcgcgtcggcactcgaaaagacgctcgacaatccggacatccacctgtactgcgacgtggaattcggcaaggacgtgacgctcgacgaactgctcgaacgttacgatgccgtgctgttcgccaccggtgccgtcgaagacaagccgctcggactgccgggcgccgatctggacggcgtgtatggcgcagccaagttcgtggaatggtacgacggttatccgaccggcgctcgcgaatggccgcttgaagctgaggaagtcgccgtgatcggcggcggcaacgtggccatggacgtggctcgcgagctcatgcgcaatgccgatgatctgaaggagcgcaccgacattccggacaacgtatatgagggcatcaagtccaacaaggcgcgtgtgcttcacttgttcatccgtcgcggtgtggcgcaggccaagttctccgtgcaggaattgcgtgagatggagaagctgccgggagtgcagctgatcatcaacgaagacgatttcgatttggatgaagacacgattgaagaggccggcaaagacaagctgactcgtcagatggtcgaagagctgttcacgattcgtgagatggcggaagacatggaagatgacggtgacgtggattatgagggtaatccggctgaccgcaaatattacgtgcacttcaattccgctccggtcgaagtgttgggtgaggacggcaaggtcgttggcatccgtgtggaaaagaccgagacatcggcggacggcaagatgagccgtaccggcgaattcgaagagtatccggtgcaggctgtgtaccatgcgatcggctacaaaccggccactgcgccgggcattgcgtacgacgagcgtcatgcgcacttggcgaacgcgaacggtgacggtcgtatcactacggccgctgaagccacggatgaagtgcgcgagcgtctgtatgcgaccggttgggcgaagcgtggtccggttggcctgatcggctccaccaagtccgacgcactgctgatcgtgaccaatatgctggaggatttgtcgaaggctgctgaaggcggtcgtgtggctgccgatcgtgatccggagtccatcgaccggctgctggaatcgcgcggtgtcaagccgatcgacttcgctggctggaagaagatcgatgcgttcgaacgtgccgagggtgcgaaggaaggccgtgagcacaagaaggtcatcgatccggagcagatgcgcgccctggctcacgcttaaggtgggtgtttgggatctgatctgataggtcccaggtttctttcatgcgtcttggatgtccgattctggagaatcggtcacccaagacgcattttttatcctgtgcttgtctgtttctggtgaatcggacatctggagtgtccgaaacatgttctgtatgtctgtttctggtgaattggacatgtgatgtggacgaaggacttgctacttgtccgattctcccgattcggtcacccaaaggcctcttggcatgcatcggatgtccgtttctgcagaatcggatatccggggagaagctgagcatgcgaacttccgcaactgccccctagtcctttccgcagtccagtctccagcacatatccagcaaaaactcaggctccgtttctacgctagtgaccatgaacggcaaattgcgggtgcatggccattgcaatggcttgaagacaacgctgttattcgcgttgatgtggggcgtcatcatgctcatttggtgggcgaccggtggcggccagcgtacgcttggcatctacattctcatcggacttggctcaacgttcgcatcctactggttttccgacaaacttgcgatcgcatccatgcatgcgcaggaagtcagcgagcaggaagcgccggtactgtacaaaatcgtgcgcgaactgtctgcgaaagcgggcaagccgatgccgcgtatctatatcgctccgaccatgagccccaatgcgttcgcaacgggacgcaatgaacgtcatgcggcggtctgctgcacgcagggcattctgcagatgctgaacgaacgcgagattcgcggcgtacttgggcacgagcttatgcacgtgtacaatcatgacattctgacgtccgcgatcgcttccgcaatggcgacggtcatttcgtatctcggctattcgctcatgtatttcggcggcggcaattcgcgtgacgatcgcaatggttcatcttctaacggtcttggattgctgggtgtgctgttgagcgcgattcttgcgccgattgccgcttcgcttattcagatggcgatttcgcgtacgcgagaatatgatgccgacgaagatggttccatgcttacggaagatccggaggcgctcgcgtccgcattgaataagatttcgaacggtgctgaggcgatgccgatgcagaagactgccggtacgcagtcggttgctgcgatgatgattgcgaatccgttctctgcggaaggtttttctcgcctgttttccacgcatccggcgactgaggatcgtattgcccggttgatgcagatgagtcaggagatgaaggcgcggggcgtgcagttcggctatttggctggcggttatgccacgagcggcgttgcggcggcggatattcggcaaggcggacgttctgcgatggctggtgccggtggtccgcaatttggaacgcagtatgggtccgggcatgattcgggcggctcggctggcagatattctcgtgactattcgcagcggtcgcgcggctgagtcttccgtgatattgcggaaaattgatatcgcatgtcggtctgtgtccgcatacgcatccgttgcgtgctaaactgaagtttcgtgcccaaaaggcacagccttgcggatgtagttcatcggtagaacgaaagcttcccaagctttaaaggcgggttcgactcccgtcatccgctccattcgaaacccttggaatcgttggaattccaagggtttttctattgccgtaaaagacccgtgaagtcaacttcgcgccgcgcaactgtcggttgcgtcgcaaaatttggttgcgaatcgcaatgcaaccgaaagatggtggcgtggaacgcgacgcttatgacaagctgttgcttggcaatcgccaataatcgcaagtcgaggcgatatggaaactcgacgaaagggcggacatgagtttcaaagagaatctgcagtatctgcgcggttcgcgcaacatgacgcaggaacagctggcaatgctgctgggcgtttcccggcaggcaatttcgaaatgggagtccgagaaggcataccccgaaatggacaagctgctgatgctttgcgacatgttcggcgtgacgttggatgatttggtcatgggcgacgtgcgcgcgtcggcaggctgtgggggtgcgggacgcgtggacttggctgctgatacggatggtgtggccgcgtcggttggggtggccgacgctgctgttggcgcggttccgggggtaatcgggtttgcggcatcgcaggtcgcaggaatgtccgattctggtgaatcggacgtgagggatacgaatccgaatgtttgtgcgtccgtttctggtgaatcggacgcacaaggtgccaaaaccggtgttcaattgtccgtttctccggaatcggacatgcggggtgggcggcaggtaggctggaatccgtgaatacggatcagaaacttcccgccgaatccgcaggcgaacgccccagtacccccctatttggtcatgccatatcacacgcggcgacactcatcggcctgttcgcaatcgtcctgtggggcttcatggccggcctcgtgcgactcgtttccgaatcgttcggcgccacgctcggctcggcgctcatctacactgtcggcggcatgctcctgctcatcgtgcgacggccgaaaccgattagccaagcgccacgcaagtacctcgtcgcaggtggactcatgttcatcgcatacgaggcgtcgatctcgctgtcgatcggtctggccacaacgaacgcgcaatctgtggaagtcagcctcgtcaattatttgtggccgacgctgctggtactgatgaccgccgccgtgtcgcacaaacgcggctcggtctccgaagcgctgccgggtgcaatcgtagccaccgtcggcgtggcaatggcggtcggcggtgaaaaccttgacgtgcaggaagcggttgccaatatcgccagcaatccattgccgtacgcgctcgcgttcgcaggcgcctttatttgggcgatttacgcgaccgtgacgccatcgatgtccgatggttacgatggtacgacgattttcttctgttgcgttgctgttgtgctgtggattatccatttcgtttcgggcgacggtttgccagctgtagcgcctggcatcggcggctatattgcgctgctcgcatgtgccgcgtcgattgctggcggctacgcgtgctgggggtatggcatgctacatggcagtatggaaacgcttgcgatcggttcgtatgcgacgccgctgttctccactgcttccagcacgctcctattgggcgtgacgttgggcatgccattctggatcggtgtcgcgctggtggtggtcggctcgctgatcaacgtgtggtttgcgcgacgccgctgattgtccgattctgcagaatcggacgcttgttggtgtgtgaggaggcgacatgtggggtagtggcggcgcagaggagcgccgggatggcgcagcggtacgtaagggaagtgaccgggcaggacaatgcccttacgcattcacgctagcttaggtttttgtcggctggtatttggtgtgtgttgccgttggcggtgatggtgatgcgtcgccaatgacgcgtccatgtgtgccagccgaaaccgatctaaaccggcttaaaccagcccgttcaaatccacctcgtcacatcaccttggtggattccagattgcggctcacccagttgttcaaccggatcaccggcttgcgcaacaccaatcccagcagcagcgaaggaatcaggaacaaggcgagatacaccatgtcaagcaggtactcattgccgtacgatccggccatcgcggcgtgcatggcatcgatggcgtgcgggaacggtaggaacgggtagagcatttggaagaacttcggcagcgtctcgatagggaacgtaccgcccgaaccggcgacctgcatcaccagcagcaccacggccacggccttgccgatatcgccgaacgacacggtcagcgtatacacgatattcgagaacacgagcgcggcaagccaccccacggcaaggagctgcagcgcatgattcgcctgcacgccaaggaaatacatgtcacccaggcaaaccagtgtgccctgcagcaacgcgagcagtgcgaagatcgcgtaccgtccgaaatactcgtggtcgaggcgcagtccccaacgtgaggcgttccccgggccggacgggccggcgacgcgcggcagcgtgtcgcccaagcccagcacatgcgccttctcgcggtccgaaattgtcactttcagcatggcgcacaggatgatcgcacccacccagattgacaggatcgtatagaacggcgccatggccgaaccgtagttcgcgatcgggtacactgagacgcgctgcagtgcgacgggcgcggaaatcagcgtggacagtgtggacgcgttggcggtggccagtgcacgtagttcgtccgattcacccgaatcggacgaactggcgtcgttgtcaccgtctccaccatcgctgttgccgtcaccggcgttcccgcccgtctccagcttcgtgatcagctccttcaccgtcgctgccgacgagtcgagtttcttcgcgatcgcgccgagcgtggaacggatggatgtcacattcgtccccacatcgcccgtcacatcgtccagatcgtcggcggtgccgctcagctgggtgatcatgctgtcggtttgggagatcagcgtgctgactgtggaggcgagcgcgtcgattttcggcttgacgttcgtggcgtaatcgtcgcgcacattgctgatcgactgcttcgcggaggtgatgcggttcaggatctccttgcgggagcgttccgcggctgcggtatcctgcgtgacctgcgtggaagcgtctttcagctgctgcgcgagcttctgcgaatcgcctttggcggcttccagcagcgtgatctcccggtcgatggcttccagcagcgcctgtttcgcggaatcactgtccggcagttgttccaccgattcgtgcatgtggttgaggcttgtgatgtacgtgtcgtacagcgattcgctgctggagacttgttcgctcaacgttgtcaactggctggctgcggtgtctgagtccttgccgatcgcgtcgaacgccttgttcaccttggcagctacttggtcgaacgcgcctgacacctggtcgagcgcggtgttcactgaggaggtgacgttcgcacctgccgaagtgaacgacgtggcacctgatttgccttgcttcaacgcgttctgggcctgtttgcccgccttggtcgccgaggcgagcagtttgcccgtggaatccacgatgtcgttcgccgagccgagcagctgcgaatacgacgttacctgctgcgatgcgccgctcaacgtatccgccatagtggtgagattgccgttgaggttgcgcatgtattcggccatttgcgggctttgcgaatagtgtaggatgcttgaggccaggtcgagtccgacttgcgcgatcgttttggcgaaggttttgtcgattgtgttgaccacggttgtcgcgccctgatcggtgatatgcggggcgatcgggttgattttctcgttcagatagtacttgagctgcgcgtgtttgatgtcgggggagaacagcgtcatcatgtcggcgctgaaacctttcggaattacgatcgccgcatagtattcgccggatttcaccccgtcgattgccttgtcgcttttcacgaattgccagtccagctggtcgttggcgtgcagtgtgctgatgatggtttcgcccacgttgacgcgcaccggtatgagatccgacttgtaacccttgtcgttattggccacggcgaccttcaatgccttggtgttgccgtaggggttccagctggccgcgatgttgaaccaggcgtacagcgccggcaccaccaccaggcccatcgagacgatcacggcgatcacgttgcgggtggcgtggcacatgtcccgcttgaagatgccccagatcattttcactgttcgttcccctcctcacgcagactcctgccagcatttccgtccgtgtttccagccgcatactcagccgcatgttcaggcgcatgtccggccgaaccaccatgcgcagcctcatacagcctcgtgcgtacggcatgcatcggcttgtaatgcatgcccggccggaacagcaggttctcgtgcaggatcgcgctgcggaactcttccgcactcatcgcttcctcgcccagataattcgcataccgttcgcgcagatactccaccacgatgagatacgtgtcgatggcgatgatcgaaatgatccaaccgagcagcatggcgagcttcatgcgcgtgatgaatagcaacagcaggaacacgaacggcagtaccgccagcgcgaggaatccccagcgcaccaggcgcgggtacaggcggaagaaatgaatcgcccgtctgcgggctagttcggggaactcctcggcgatctgctgcgcggtctcggtgagccgcaacggttccaccgtgccttcgttatgttcggtgatcatcagatcagtgtccgccagacggttgtcgaacaggcggttgaggttcaacgccagcttgcggacgaccaagccgatgaacagcgccacaggcagataccagaacagcgagagcatgtcgatccaataatggttggcatacatgccgccgatcggcccgcgcatcgcgttgatgccgtaggtgaacggtaggaacggtttcagacggcggaagaattccggcatcatctcgatggggtagaggcctgccgcgcccggaatctggatgatcaccagaatcacggcgacggccttgccgatatgccggaacgccacggcgagcgcgtaaatgatgttcacgtagatgaacgaggcgaaaatgccggcgaggatgaacaggaacggatgctcgcattggatgcccagcgcgagatcgccgatcgtggcgatgatcgcctgcaggaatccgaccgtgacgaacagcagccaacggcccatatagccttggcgtggcgtgtacatgcggatcttctcatcgcggtccacttcaagcttgtagatcgcgacgagcacgaatccgccgacccatagcgcaagattcgtgtagaacggcgtgaccgcggaaccatagtttttgaccgggtagaggacctgttcgtccaaatgcaccggctcgcccacgaacgagccgacctcgctcgcgtcaagtccgagcgcttgggaaagctgctggaacatcgccgaactgctcaacgcggccacatcggtgcgcgtggtgttgagctgtttggcgagattggcgagctgcgtctgcgtgccagcaatggtggtgttcgtttgggtcacggtgcgcgacaactggtcgagcagcccgttgccctgttccagtgtgctttgcagcgtggtaagcgtgccggacagcgacccattggccaggctgagtgtatcgagcccggtgttgagattcggcatgaccgtgccggtgatggtcgtgcgtgcgctcgccatcgacgccgtgccgtttttcgccagcgtggtgacatcgtcgttgaacccgttcgcggtgttcttccccgcgttgatcgcagccgtggtgtcctgatcgaaggcgtcgatgcgctgctgctggaacgtcagctgtttgcgggcttcggcgagttgcgcggaaagatccttatacgtttggctgttcggatccagctggctggcctgcaacgccttctccacgccgtcgagcacattgccggtggtggtgttgacgtgatgcatggtgctggacacttggtcgagcgcgtcctgcgtggtgttcagtccgctgagcacggtgccggtggcattgctcacgttgacctgcagaccggacagttgcgtgctgccgttgtcgagcgctccgaccagcgtgttcgagaatcgttcggtttgtgtgcgcgtctcgctcagcaagtcggacgccttgccgacggtgtcaagcgagttggtgattcccgaggcgagcgcgatgttggactgtttggccgaatcgatggtggtgagggccttgtcgagcgtggaacgcgtgccgcgcagctgctgttggacggtttcgagctggttgatggtgtcggtcagatcgttgatgacgtcgctttgcgcgcttttcatgctgccggtggtttctcccgctgcctccttcacttccttcgccacggcgtcggccacgctggaaacgaaagtggtgttgatctgctcgtcgatcgtggtcgcacccgtatcggtgattttcggcgcgatcgcgttcagcttttcgttgatgtagtacgtgatcgacggtcggtcgcctttaccagtgacggtgccgattagtctggagctgaagtcttccggcagtacgatcgccgcatagtatttgccggattccacgccttcgatggcttgctgctcgggaacgaaacgccagccgagctgatggttcttcttaagctggttgacggtttgctggccagcgtcgagatgaccgaccagcgtggaggttgtgcccttgtcctcgttcgccacagcgacctggatgttgcccgtgttcgcgtacgggtcccagttggcgaggatgttgcaccatgcgtacagtgatgggatgatggccacacccagcgtgacgacgagcgccactgggttcttcagaatgcgtttcacgtctcgaaggaagatggcgaaaacctggtgcatcaagcctcctcgcgggtattggtcgcaacatctacgtgcggcggcatgcccgtgcgggaatacccggttgggctcttcgtcgcgcgatccggtggatattctatgacttccgatggaacgatcgcaatggtttcgccctgtttaatggtcggtcccgcaaatgtcgggatatgagacgaaaacgctcggcatatggccctagtggggcgggcgacctggatatggagcggacggtcgggaaaacggaaaggaaagatggcgaatgttgtcacatgataagtgggatagggtcgggcgataatggaggcatgactattgcaacgccggaacgttatgcgcaaatgctggacgccgcacgccgcggcggttacgcctatcccgcgatcaatgtgaccagcacacagaccctgaacgccgcactccagggtttcgccgaggcggaatccgatggcatcatccaggtctccgtaggcggcgccgcctacttctccgggcaacgcgtcaacgaccgcgtcaccggctcgcttgccttcgcagccttcgcgcacgaagtcgcggcgaaataccccaacatcaccatcgccctgcacaccgaccactgcgccaaacagtatctggacgaatgggtgcgccccctgctcgaccatgaagccgaacaggtgaagcacggtcaggaaccgaccttccagtcacacatgtgggacggttccacagtgccgctgggtgaaaacctcgacatcgcagaagaactgctcgacaaatcccaagccgcgcacaccgtgctggaaatcgaaatcggcgcggtcggcggcgaagaagacgggcacagcgccgaaatcaacgacaaactgtattccacgcccgcgcaaggcatcgccgtcgcgcaacgactcggccttggcgagcgcggacgctacatggccgccttcaccttcggcaacgtgcacggcgcatacaaaccaggcgtggtgaaactgcgccccgaactgctcgacgaaatccagaccacggtcgcgctcgcgatcaaggccggcgaaatgcccgaccccgcgcactcgctggatgtcgcttccggtaagccgttcgccctggtgttccacggcggttccggctccgcgccggaggagatcgcgcaggccgtgagctacggcgtggtgaagatgaacatcgacaccgatacgcagtacgcattcagccgtgcggtggccggtcacatgttctccaactatgattcggtgctcaaaatcgatggcgaggtgggcaacaagaagatgtacgacccgcgttcgtgggggcgcgaagcggaaagcgccatggccgcacgcgtggtggaggcttgcaggcagcttggcagcgcgggcaaggcgttgaagtagtgtgatgccgcacgcgccgcgtaatgcatgcggcgtgtggcggcacggtgggtgtgtcgcgttgtatgagacgaaaacgatggaactgactagtttcaacggccgatcggtgcatatccggcagatatccggtagagggcgcaggatagtctttgtaaggccttggtaaggctttgaggcgaaatcgcatacgcgcggaggtgcaacaacatgcctggaattgttttgatcggtgcccagtggggagacgaaggcaagggtaaggcgaccgacctgatcggcacgaaggtcgactatgttgcccgcttcaacggcggcaacaatgcgggccataccgtggtggtcggcgacgaatcgtatgcgctgcacctgctgccctccggcatcatcagcccgaccgcgactccggttatcggcaacggtgttgttgttgatcctgaagtgcttttcgaagagatcgacggcttggaaagccgcggtgtggactgctcccgactgctggtgagtgagggtgcgcacattattacgccgtatcatcgtgtgcttgataaggtgacggaacgtttcctgggtaagcacaagatcggtaccaccggtcgcggcattggacctgcgtatgccgacaagattaatcgcgtgggcatccgcgtgcacgacctgttcaatgctgagcatttgcacgacaaggttgaggcaagcctgcatcagaagaaccagatgctggtgaagctgtacaatcgtcgtccgattgatgtgaacgaaaccacggatgagctgcttcgtcttggcgagcgcctgaagccgtatgttgccaatacttcgctggtgttgaacaaggcgcttgatgagggtaagaccgtgctgttcgagggtggtcaggcgaccatgcttgatgtggatcacggcacatatccgtttgtcacgtcctccaacccgactgccggcggcgcatgcaccggtaccggtgtcggcccgaccaagatcacccgcgtgatcggcgtttccaaagcgtacgtgacccgcgtgggcgaaggaccgttcccgaccgagctgttcggcgaggagggcgaatggctgcgagcccagggccacgagtacggcgtgaccaccggccgtccgcgtcgttgtggctggttcgatgcggtcgtcaatcgttatgcggctcaggtcaacggcctgaccgacatcgtgctcaccaagctcgacgtgcttaccggcctgaaggaaatcccattgtgcgtggcctatgatgtcaacggcgaacgccgcgacgatatgcctactgatcagtccgaattcgcggcagcgaagccgatctacgaatccatgccgggttgggacgaggatatttcccaaatccacgacttcaatgatctgccgaagacctgtcaggattacgtcaagcgtcttgaggaactgtccggctgccgtatctccgtgatcggcaccggcccgcagcgcgaccatatcatccagatcaattcgctggtcgactgaccgtcggcaacgagtttcccggcttgactggcaacgacgcggcacatgatatccgccggctgattccgcgattcgaccacttgaagtggaagatggcggcggccggcatagtcattggtctggtttcaggattgctggtcgtcgtataccgtctcggcatcgaatacggcaccgacaccgcgcgctggatctacgcgcgcatccgcgaaaccccgtggctggtcgcaccgtgggcggtcgccgcaatcgcagccgcgctcgccatcgcatggatggtcaaaaaagagccgatggccggcggcagcggcattccgcaaaccaacggcgtggtgatctgcggcctgaaaatgcgatggcagacgattctgccggttcgcttcatcggaggcctgctcggatcgctcttcggcctctcgctcggccgcgaaggaccgtccatccaaatcggcgcatcgggcgcgcagttcctatcgcaccggctgcgcggcaagaaacgtgaggacgtgcaggagcattatctggtcaccgccggtgccgcggcaggcttgtccgccgcgttcagcgcgccgctgtccggcatgatgttcgctttggaaggggtgcatcggagtttttcccctgcgattctgatgggcaccgctgccgcatcgctgaccgccgatttcgtctcgaaatactgtttcggtctgcgtccggttttggatttcggggatatcggtcagctgtcgttggaagagtatgtatggctgattccgttgggattggtggccggtttggttggttcgctgatgaaccgctcgttgcttggcttccagacgctgtacggcaaactgccggcatggagccgcccgatgattgcgattgcgatcgcgttgcctgtcggcatctggttgcccgacgtgctcggcggcggctcgaatctgattgataccgccgaacatgcgcgcgtcggcttgggaatgctgtgtctgctgttcgtggcgaagatgctgttcacatccacgagtttcggctcaggcgcgcctggcggtatttttatgccgattcttgcggtcggttcgctggccggcggcatctgcggtgaagtgttgcatcgatttggtgatctgccatccgacgcagtggcggtgtttgcggtgtgcgtgatgacgggcacgctcgccgcgtccgtgaaaacgccgatcacgtcgattctgttggctgtggagatgtccggaacgttgacgcacatgctgccggtcgctgccgtcgctttcatcgcgctgttggtgtccgatctgctgcgcaccaaaccgatctatggggagttgctggagcggtacgtgcgtgcgcaaggcatgcagatggcaatcgcaagccatgtgggcagcggcattatggaactgccattggaaatgggggcgattgcggacggcaagcgggtgcgtgacgtgcgttggccgtctgggtgtctgatcatcggcctgcgtcgcggcgaaagcgagatcgtgccgcgcggtgatacacggctgcgtgccggtgactatctggtggtgctgttcagtggcgaggaggagcgcgaggtacgacctgcgatgcggcggctgtgtgatgcccggcttgactgagcctggctgaattcggctggactctggatgtccgaatctgcggaatcggacatccagggtgcatacgttggcgctccgtgtaaactcatatgcgttaggaaggcggcaaccgcggcccagctcgttgttgcacggcctatgggcggaacaacgctgtccgcgggaggccagtacagggggagcgcaatggaatcgcaagaacaatcgtcgggagacgtggtgactgtgggtgaggactcgcatcccatcacgcaggcaatcgacactgttgaggtgacgcatgctggtgcaaccacgcccgccgctaacaccatggatccgcctacgattcccctggcaccgatgaaacgtatgcaggcgcggttcaatccgctcgccgacggactgatgtatgttgtggtgttcgtcggtggatttgttggagtcggctgtcggcatgcgttggatatgcttctgccgtcggtcagcgggacgccgttcgttgtgggcacgtttgtgtcgaatatggtcgcctgcttcctgttcgcgatgctgaccgaattcatggcgaccgcttcgtggctgcgtcgccgggtgcggcaggttgtcagccgtggtgttgggcttggcttgctcggtgggctttcgacgatgtccggcgtgatgctggaaacgatggaaggtctgcacgagcggcatatcgccagtgcgcttggctatcttgcgggaaattttgcaggcggtttgttcactgccgccgccggcgtggttctgatgcaggcactgctgtcacggagtactcgaaagcgggttcggggtgcgttttcagctgtttccgtgtccgattctgccgaattggacacgcagggcgtacgccatgtgaaagtggccgacgtggcgcgttctgccgcgcaggccgcaatggaagccgcgcaggcggcgcagcaggccgcgcaggcggcccagcagattgcacagacgggacaggttccgcgagtcgaaacaccaaccgtgccgccgaccgccagccagcctatgcagaccggccgcgttccgcagattcctccgctggccgttcctcagctgacacagccatcgcagccgttgctgcgcgagccggatactccagacttggggcagctgcccgagccgactcagcagtcgcaaccaatccagcagccggccaacccgcttccgcccagcttcgagcccaaaccgatcactgcggagatttcgcttgtcgccgacccgtctaccggggaggtgtgctgatgatgtggatgatctgtctgttcggcggtctgggcgccatggcccgttacgtgctcgacgtgtcaattcaacgaggctggaatcgcgagaatcggagaacgagccgcaacttcccgctatccacgctcgtcatcaacggcgtcgcctcgctatgcgcgggcatcgccatgatgtcctactattcgcaatcggtggatatggacacggtcatgatgttcgttgtcggatttctcggtggtttctcaacattctccacggcgctcaacgaagtggtttcattgattcgccagcgtcgttttacgctggctctgggctatggaatagcaaccatcgcggtgcctctcatttgcgtggccaccggtttcggcattgcgctgctcgccaatccggcgtaattttcacgttacacgggcggttgctgagtaacgtgaaagaaatctgagcgcaaccgccatcaaggccgccagcccggatgcgacgctggtgattgcattcgaccagaccaagccgctgctgaaggatggcaaggatatccagtaccagggccagaccggtatcggaccgttcaataagaacaatgatccgagctccgcgaacatcggcgtctacaccttcgacaaagacaacaagccggtcttcgaccacacccagtccggcgacgtgccgaccgactgatcgcaatgtaggtcatcatcaatacaagaagacggcgcaaagtgagtgtggatatcgcaagctttgcgccgtttcttttgttgtgctgtgctgccgttttccgtgtcgtgggcagcatacgaaaatcaatattgaaaatcaagtaaaggggtaaccccgtcaaatgatatacacaccggactgtcgaacaggttcgagagaatgtaaaataagtataatatctcgcgagaggcgcgcagtaagcgcgtgagaatacaacgatggaacagtgataacggggaaggtgcgatcatggtcggcatgcgcgatgtggcgaagaaggccggggtgtctctgagcaccgtctcactggtggtgaacggcaacgggtatgtagccaacgacatgcgcgaccgcgtgcgtaaggccatgcaagccctcaattacgtgccaaacgagcttgcccgcaacctgtaccacgatcgcacgaatctggtcggcgtcatcgtgcccaccattcgtcacccgttctttgcaacgtttaccgcgcacctgcagcatgcgctcgccgcgcaggggctgcgcaccatgctgtgctccaccaccgacgagacggacggcgaaatccaatacgtcgatatgctgcgtaggcacatgatggacggcatcgtcatgtgtgcgcacacttcgcatcccggcgattattggacgtcgattcatcgcccgatcgtcgcgttcgaccgtgtgcttggagacggtatttcgtcgattggatccgaccacgagcagggtgggcgattgattgcgcagatgctgatccgcaatggtgcgcgccatgtggtgatgattggcggtccgcgagatcaattcttcgatttggctgcgcgcggagaagttgaggaagggtcgttcgatttgggaaagaccacgttcccgacggtgcgctattacctcacgttggaacaggaattgacctccgcgggcgtgaagtatgagtatatcgaggccggtgaggtgatggatttcgccggctatcatcgtgcggtcagccgtgcgcttgatggggtggcgaccgacggcgttgatgccgtggtcagctccgatattggcgcggcgttctgcgtgcgtgaggcgttgagccgcggaatttccattcccgacgagctgcaggtcgtcgcctatgatggtacgtatttgaccgatttggccggtatgaagctgaccgcggtcgcacaggatttctcggcgatcgcgcagtcggcggccgaccatatggtgcaggcgatcgccaatgaagaggcggctgcggccaacgcctcgcgcaagaacatccccaagccgttcgagccgaacgtgcttattcccatgacgctggtgccaggcgataccacgcgttgatgctgcgcgttggaacgctgggttggggtcggacagtctgggctgcatagaacaccgcatcaaaccggttcgacacgcgcattccgctgtgtgactggacattgacgcccctctcgaggtaatatcgaaccggttcgatacatacgtgagtatgcaaatacgtaaacaacaaacaggcagacgcgcacacattgcacccgcacccatgaaccaagggaggtcccatgaaaaacaaagtgcagctcatcacctacgccgatcgcctcggcgacggcaccctcagctcgatgaccgacatcctgcgcacccgtttcgacggcgtgtatgacggcgtgcatatcctgccgttcttcactccattcgacggcgcggatgcaggcttcgaccccatcgaccacaccaaggtcgacccgcgcctcggcggctgggacgatgtcgccgaactttccaagacccacggcatcatggtcgacgccatcgtcaaccacatgagctgggaatccaagcagttccaagacgtgcttgaaaagggcgaggaatccgagtattacccgatgttcctgaccatgagttccgtctttccgaacggcgcgaccgaagaggatctggccggcatctaccgtccgcgcccgggtctgccgttcacccactacaagttcgcaggcaagactcgcctggtctgggtcagcttcaccccgcagcaggtcgatatcgacacggattccgacaaaggctgggaatacctgatgtcgattttcgaccagatggccgcatcccacgtcagctacattcgtcttgacgccgtcggctacggtgccaaggaagccggtaccagctgcttcatgacgccgaaaacgttcaagctcatctcccgcctgcgcgaggagggcgtcaagcgcggcttggaaatcctcatcgaagtgcattcctactacaagaagcaggtcgagatcgcgtcgaaggtcgatcgcgtctacgatttcgcccttccgccgctgctgctgcattcgctgaataccggtcatgtcgagccggtcgcgcattggaccgacatccgtccgaacaatgccgtcaccgtacttgacacgcatgatggcatcggcgtgatcgacatcggttccgatcagctggaccgttcgctcaaggggctcgtgccggatgaggatgtcgacaatctcgtcaacgccattcatgcgaacactcacggcgaatcgcaggccgctaccggtgccgccgcatccaatcttgatctgtatcaggtcaacagcacctactattcggcgctgggatgcaacgatcagcactatattgcggctcgcgcggtgcagttcttcctgccgggcgttccgcaggtctactatgtcggcgcgcttgccggcaagaacgacatggagctgctgcgcaagaccaacaatggccgcgatatcaatcgccattactattccacggctgagatcgacgagaatctgcagcgtccggtggtgaaggcactgaacgcgcttgccaagttccgcaacgagcttgatgcgttcgatggcaccttctcgtacagcgccgacggcgatacgtccatcagcttcacgtgggagggcacgaccactcaggccacgctcacgtttgagccgggccgtggtcttggtgtggagaacaccgcgtccgtcgccacgctcgaatggcgtgatgccgccggtgagcaccgcacggacgatctgatcgccaatccgccggtcgcggcctgattcagcctcgcctgatccggtcgctgcctgaccgcgcataaatccataaatctgtaatcgtccttcctgtcacctctccttcaggaaggacgattcgcattttcgttttttcgagcaatcgtcttatcgggaaaacaattttcccgggaatcagctgaaatcccagcaaaaacgggtaaggtgagcttatgtcaaagatgtcaaagcttttcgatcaagacaacatgtttttcgccattatgggcgtgctgttcgatctgattattctcaacgtgctcacgctgttgtgctgcctgccggtcgtcacggccggcgcatcgttcactgcgatgcacagtgtgctctggcgcatggtccgccatgaggaaacgtatgtggcgcgccagtttttcgactcgttcaagcgcaatctcaagcagtcgctgctgccgtggcttgcgttcctgctggcggcgattgtgctggtggtcgacggcatgctcgcccggtccatggggtcgatgcgcgggccgctgatggcgtgcgtcgcgttcatgggattggtgattattgcgattgcgcagtacttcttcccgctgctttctcgctatgagaatccgacttccgaaacgttgaagaatgcgacgaaacttgcgctcggctttttcccgcgcaccttgtgcatgctggtgattttggccgcgttcgccgtgctgtatgcgcagtttttcatatatatgattccgctgctgattttgatgggcgtcacgttgccgcaatactgttgcgcgtggatctacaactggattttccgccgtatcgacggtgagatcgacgccaaggggcgcaaggtagcgcagtcctgaaattgtttgctcgtaaaggccgttccgcagattgcaagttccgcggaacggcctttacgcgttttcgtcgccttgagtgtccgattctggagaatcggacaactggaacgtacttttgggcgcgtgaatgtccgtttctcccgaattggacaaccaggatgtgtttttgagtaccagaatgtccgtttctcccgaatcggacaactacaggtcaaagtggggtgcttgaatgaccgattctggagaatcggacaaccgtgggtctgttttggtgttccggttgtccgtttctggtgaatcggacaaccggaacatgttttgaggcgcttggatgtccgattcttcagaatcggacacgctgggggcaggattagcaggggaggatggtagcgctgcgggctgggacgtgcagttgggtgccgtcgaagcgtgcggggttgccgatgctcagcagtactgttttctccgctggttcttgcgttggtttcgctgttggttcttgcgatatttcctgcgctaagccgccagacagcagtttcacatagtcgctcggcagtgtgcagcttgcgtcggtgtttgacggattgatggcgacgacgatgcgctcgccacctgcttcgcgattaatcttgctgcatgtttcacaaggtgtttcacagctggtttcgtgtgctgttccgctgcgttcgccgtcagttgcgtcgcgttcggcttcgccggcctcggagcttctcgcgtacaccagcggatacgcgtgatcttccgcgtagaggaactcgatgcctccgtcggcctgcagtgcgggatgtgccaggcgtagcgtgttcagtgcgcgtacggtttccagtagcgagtcgctgcgtccggtctgcgaagccacgttcgggcgctcgctgtcggcatcgatcggcagatacagatcatcgggccgggctgcggagaatcctgcgttggttgcgcagctccattgcattggtgtgcgcgatccggtgcgctcgtatccgccttccttggatttgagcccgtgcatgtagcgcatgccgatttcgtcgccgtagtagatgaacgggcagccgggcatggtcagcaggaatgtgaacgcgagcttcatttcatcggtggtcaaggtgtcgcgcatgcggatcatgtcgtgattgcccgacggaatgcagatgtatccaggcgttccggcggtgctggcaagcatggccgtatatgtgtccacaaacgccttgatgtcgccgctcgcattgccgacattgtcgttattacaatttggattgtctccgtcgacgactgaattgccgttgctgtcgcacccgctgctgcccgcgccgtcgcattcgctgcgttcgccgtcgtgtttcgtttcggcagtttcggcgctgcccgtagcttcggaagatccggccgaaaaatacggattctcgcggaacaggtcaagataatgcgacggcccgaaatgcagcaggaagtccatgtcgaatccggcgtgcagcgcctcttcggggtcaccccattccgatacgagcaccgcttccgggtaggtttcgtccagatgcgctcgcacttgctgccacaagagtttcgtccaatagtggtcggggtcttccttgacgaggctgcctgccatgtccacgcggaagccgtccgcccccaacccgagccagaagtccatgatgtcttggatgagcagccgtccctgcaccgcttcgggggagtcggcggcgaactgccagtcttcggtgacggtgccgaatccgtagttgaggcatgcctgcgtggagaagcagttcacggccgccgcgtcgggacgttccgcaatgcctccgaggaatccgcggattgattcgtatggcgagttcagattcggcgattgcgtcatcggtcgccagatgtagcggtcggtccatgcgttgcgttcgtccttgccggattcaagaaaccatggattgtcgaccgcggaatgcccgggtacgaggtcgagcagtacgtgcatgcctagttcgtgcgcgcgctcgaagagccgctgcaggtccgcgttgctgccgtagcgttccgcggctgtgtagtagtcgcgtacgtcgtagccggcatcgtagaacgacgagtcgaagcatgggttgatccagatcgcattgcaccccagatcgcgcacgtattgcagtttgtcgatgatgccttggaagtcaccgataccgtcgccgttcgagtcgttgaatgattgcggatagatttcataaaagattgcgttgttgagccagcttgccataaatactcctgttttcgcgtctttgctgttggtctaccgatgtatcgcaacgttggaaacgtcggtcactgcttttccgtcattatagcccgtgaagacactttttaggggtgtgtggaatgccaatgtttgcaatacgtcaatcgattgacgcgacacgccgacggatggcactgtacacaaggtttctcgaaccggtttgacaactctcgaaccagtttgatatcctgtataccaagaacggagagattccgacaacgcgagtcggggattcaccttcctttatcacctcattgggcagggctgctcggtgaataatggatagaaagggattggaaaatgagcaagttctcttcttggaagaaggctggcaccgctattgttgcaacgctgatgaccgttggcatgctgggagcatgcggatcgtcatccagctccagcggcaccaagatcaccatcttcaactccaaggttgaaatcgaaagccaaatggaagacatggctgcgaagtactccaaggaaaagggcgtagacgttgaggtctactactccaacgacaccgtcgcagcgcatctcgccaccaagtacgcatccaaggatccgtacaccatctccatggtcgacgccaaggacatctactccttggctgaagagcacgccgtcgatctgtccgaccaagattgggtcaaagacaccgactacgccatcagcattgacggcaagacctacggcttcccggtttccgtcgaagcccgtggcctgatctacaatgctgacgccatcaagaaggtcaccggtaaggaattcaagcctgagaactacaagacccttgacgagttcaaggatctcatcgacgagctcaaggccggcggcatggaatccccgaccggtgtcatgaaggaagactggtccctcgccgggcacctcctgccggaagtctacgaggagcaggaagatccggacgccttctgccatgagctcaaggacggcaaggtcgacctcagctccaacgccaagtggaactccctgatggacttcttcgacgtgatgaaagacaacaactacgccaagtcctccgccatctccgccgagcgtgaggtgactgagcagaagctggccgagggtgagattgctttcatgttcggcggcaactgggattggtccgtgctgaaccagtacgattacaccgagaacatgggtctcatgccggttccgcagaacaccgatgacggctccaatgagaagctcgtcggcggcggctccaagtacttcttcatcgactcttccgacaacacctccgacgagcagcgtaaggccgccaaggacttcctgaactggcttgccgaagacaaggaaggtcaggagttcatctccaccgatgccgctctgatctccccgttcaagaacaacgacatcgaagcttccgatccgctgggcaagtccgtgaagtcctacgctgacgccggcaagctgatcggcaactacaactacctgccggacgatcactactccgtgctcggcgcagccttccagaagtggctcgcaggtgaagaggaccgtgcaggcctcgcccaggacatccaggactactggaagaccgctaagttcaccggcgcaaccgcctgaacttccaaataatgcaccatgatgcagggtccgccgcttccttcctgcggcggaccttacatccccggcacgtatgggatccatcatgaaacagaataagctttcctataaaatcggccagtttctgatgttcggtggtccggcgacgattcttttcttcgccgtggtgatcctgccgttcttctatggcctctatctgacacttaccagctgggacggcgtttcgacaacgaagccgttcgtcggtctcgaaaactacaaggcggctcttgccgacaccgcatattggcagtcgcttggacgcaccttcatctactccgtcatcgccgtcatcctcaccaacatcgtcgcctttctgctggcctacctcgtgaccagcggcatcaagggccagaacttcttccgtgcgggcttcttcattccgaacctcatcggcggcatcgttctgggctacgtgtggaagttcgtcttcaaccgcgcattcgtggccgtcgccgaagtggcgacgcaaacagaccacgcatcgctgctctccacgccaaacggcgcaatgttctgcttgattctcgtttcggtctggcagtacgcaggctacatgatgctgatttacgtggcaggcttcatgagcgttgaccagagcctgaaggaagcggccatgatcgatggctgcaacaagggcaaggccatgtggcacgtggtcatcccgctgatgcgctcctccttcgtgcagtgcatcttcctgagcaccacccgttgcttcatggtgtacgacctgaacctttcgcttaccaagggcgaaccgttcaaccagtcggtgctcgcagcaatgcacgtctacaaccaggcattcgtttacaagaactatggcaccggtcaggcggaggcgttggtcctcttcatcgtctgcgcagtgatcggcatgctgcaggtgtacttcggcaagaagggtgaggtggcagcataatgaagggtcaaaccagcactcgcaccaaggttctgcatgcactgatgatcgtcgttctgacgattctgctgctgctgttcatcgcaccgttcattctggtcgtgatcaacgtcttcaagaccaaggcggacatcaacaccgctccgctggcactgatcggcaagcacgggttcaccctggagaacttccccagggcaatggacaagatgaacttcgtcaccgtgttcggcaactccgcggtcatcaccatcagcgcaaccatactgaccatcctgttctccgcgatgtgcgcatacgtgatcgtgcgcaacccctcgtggaagttcggcggcatggtgttcgcacttatggtggcctccatggtcattccgttccaggtgctcatggtcccgctcgtgtccgtctacggcggcctgcttgacgtgttgaacagtcgtatcacgctgatcctcatgcacaccggcttctcggtctccctggcggtgttcatgttccacggtgcgatcaagacgaacattccgaacgaacttgaggaagccgccagcatcgacggctgctccaagtggcgcaccttctggacgatcgtattcccactgctcaagccgaccgtcgctaccgtcgccatcatcgacgccatggcgttctggaacgactacctgctaccgtccctggtcttgggtcgccgcgagctgtacaccatcccgatcgcaacccagatcttctacggcacctactccaacgatatcggcctgatcatggcggccctgctgctggccatgctgccgatcctcatcctgtacctgttcctgcagcgctacatcgtcgaaggcgtgacctccggcgcagtcaagggctgatcgaacggtatagaatccgcaatcataactgaacagactcacacaaccggtccggatgcgaagcgataatcgcatccgggcttttcttatgcgatatcgattcttatgcgatatcgatattgagattgcctcgcatgtttctgctgtctgacaggacgtattgatatggttgatttcgccgaaagaatcgctcgaatgcactggtgcagtgtgtccgggcgattttcatatgtgctgaatatcgtgtgacatttcgaaacgagcaacgaaatagaagcaagaacgagaagcgacgatacaaaacaggaaaaacaggaatagaaacaagagatgactgaagataatcaacataatgcaggtgagcagcagactccaatgcagccgcagccgctgccgggccaggtgttcgtacgccccggcatcgatgaccgtcccgattacgaaaaaacgctgaccgaagagaccaaagcggccctgaagcgcttggccgtacagcagaatccgcgcgtgcccgaggcttccaacgagcgtccggaagtgcagcagaccctcatcaacacggaaggcggctccccgctgaccgcgttcgcccatctcgacgccgctgtgccgaacctcgaatcgtcgttccttgacctgcgcgatccgatgaccgcgcccgacggcaccacgcccaccaagccgcaggtgcatcgtctcaccgccggcttcgcgcttggtgcgctgctgttcaccgcgccgatggccgcgctcaactctgtgctcattccgcagaccatcagccgtctttccggcaccgaccgcgtcaccgatctggcgctgctcagcgtcgtcggcacgctgttgacgttcctgatgaacgcgtggatttccgtcggatccgaccattcgtactgcccgctgggccgccgcaccccgtggatcatcgtcggcacggtgctgaccgccacgtcggtggcgattctttccgcatgcgatttcatgccgttggtcatcgtgttctggctgtttacgctgatcggacatgcgatggtatcgatgccgctggcggccgctttcggtgagcgcgtgcctgacaagttccgtgatcgtgcggacgcgtggcgtggcgttggccaagcgttcggccaggtgttgggcattattgcggccgtttcgattacgtgggctgccgacgattccggttgggatggcaccacgcgtttcgccatgatggtgtttgcgttgtgcctggtgatggctggtgcggctacgttgctggtgttgccgtttgagggttccagcagctatttgcctcgtgagggtgtgaagaagggcgattatttttcgcagtatcgtccgccgaagggcgctccgaagttcttcattgcgtttgccgcgcgcatgtttgccatcgcagctacttccggcattgcgatttaccagtggtatcttgcgcaggatggtttgggtgatgtttcgcaggtcaccatgtttggtttgtccggagcggctgcggttatgtcgatgatggccgttgccgcgttcgtcggctcgctgttggctgcgctgctgcttggccgcatcgcccgcgctttcaaagattcccgtattcccgcgattgccgcctgcttgttatttgtggttgctgtggtgcttccgttgacgccgattgatagtgctatggcggtcgcgctgtatgcgctgtttgcaggtttcgcgtatgtggtgtatgacggcatgagccaagggttgaatcttgcgacgttgccggatgtgcgttccgttggtcgttcgttggctgcgttcagtttggcgaatacgttcggttcgttgattggcgctgtcgtttgcgcgattgcgattgcggtgactggcgagtatctgctgattttcgctgttgccgccggttgcatggctgttgcgggcgtgctgacgttgctgctgaaatgatttggatgacctgagataatccgaaaaacgaatatcaaattcaaaattgcgcgtccacatagtgaacctttagtagaaagggtctgtggacgcgcttatctttacggcttagttcgagcggataatccgccgaatacaagactttgcgaaaggaggttcgccacgatgaacggaatggttgcacgcgtactgctgtccgcacgaattattattccgctttcgttggcggactgattcgagcaatgcagcttcaatccctcgccaacggaggcagggtttgaggcgcgcaaaacacacacgttgatggccctgtatgctgcggggtctttttgttgccgcccacaaggcgtaaggcaacgaaatgaagactgcacacaagagaatagaagaaagacgttatcggcgcatgttgggagccggtaacgcatgacagacgtaacaggagtaatccaatgagtgcagtcgaagcagccgctggcaaagcgcaggcaatggtgcgcgattcggtgaaaaccgtgatcgccgcttccatggtcggcaccgccattgagttctacgacttctacgcatacggcaccgccgctgcgaactatttcccgaaggtgttcttcggagacaccaccaatccgactgtcgcactgctggccagcctgctgaccttcgccatcgcgttcatcgcacgcccgctcggatccttggtgttcggccatttcggcgaccgcatgggccgcaagaccacgctggtggtttcgctgttgaccatgggcatcgccacgttcctgatcggctgcctgccgacttacagccagtggggcattgtggctgtcgccgcgctgtgcctgtgccgtttcgtgcagggcatcggtctgggcggcgaatggtcgggtgccgctttggtggccaccgagaacgctccggaagacaagcgcgcgctgtatggctccttcccggaattgggcgctccgatcggtttcttcctgtcgaacggtacctacttcctgttggaaacgttcaacgatgacgatgcgatgctggcatggggctggcgtgtgccgttcctgctgtcctcgattctggtgatcgtcggcctcgtcgtgcgagtgcagatggaggagactccgatcttccgcatggcccaggagcagaagaaggtcgtcaagtccccgttgaccgaagtgttcaagaagagctggaaggaagtcatccaagccacgttcctggtggccgttacctacacgctgttctacacgctggcaacctggtccctcgcttggggcaccaaaaccgtcgagcagggcggcggagaccttggtttcaccaatcgtgaatacctgctcatgctgatgcttgccatctgcgtgttcgccgcgttcatcgtcatttcctgcgtgaacgccgataaattcggccgcaagcgcgtgatcgtcatctcgtcctgctgcctcgtggcattcgcgctgctcttcccgttcctgcttgatccgtcggtcgtcggccagcgtaacttcgccgccaacctgctgttcctatgcatcggcttcgcgttgatgggcaccgcattcggtccgatcggcgcgttcctgccggagctgttcgacgccaacgtgcgttattccggctccggcatcggctacaacctggccgccatcgtcggcgcggcattcgtgccgaccatcgccacttggctgtcccaccactggggtgtgcactccgtcggtctgtacctcggcgtgatggccgtgtgctgccttgttgcggtgctgagctgcaaggagactaaggatgttgatttcaccaagtgatcaatcgccaagtgccgtttgaccggctattcagcgacgtgtcaagatgacatcgacggaagccttactaaaaacgtttgacgcgaatataaccactatgtgaacgtcagcaaccaatataaagaaagcgggactaaaacagttccgcaggagaggcggggtggttcctcggacacaatccgggggagtaatctcctaggaaccatcgcccgctgtgaacaaccgaaacaagaattaaatatcgcgagtttgttcgggaatgcaagtcccgaatcgctataaaaagaaaaataaaggagcgcctattatggcagcaactatctggtacgagaaggatgccgatctgtccgtgttcgatggcaagaaggtggccatcctcggttacggttcccagggtcacgcccacgcgctgaacctgcgcgattccggtgtggatgtcgtcgtcggcctgcgtcctacctctaagtccgtggaatacgccaaggagcagggcctcgaggtcaagcctgttgccgaggccgttgccgaagccgacgttgtgatgatcctgctgcctgaccagtaccaggccgccgtgtacaagaaggacgttgagccgaacctgaagccgggcgctgctctggctttcgctcacggcttcaacatccactacggctacatcaagccgtccgaggatcatccggtgtttatggtcgccccgaagggcccgggccacatcgttcgtcgtgagtacgccgccggccgtggcgttccggtcgttgtggctgtggagcaggatccggatggcaagacttggccgctgtgcctggcttacgccaaggctctgggcgctctgcgtgcaggcgccatcaagaccaccttcaccgaggagaccgaaaccgatctgttcggtgagcaggacgtgctcatgggtggcatcaaccacctgtgcgatatgggtttcgatgtgctgaccgaggctggctaccagccggagatcgcctacttcgaggtgttccacgagctgaagatgctggtggatctggccaacgagggtggtctgaacaaggctcgctggagctgctccgacaccgctcagtacggcgattacacctccaccgtcatcactgaagagaccaagaagcgcatgcagtaccagctcaagcgcattcaggacggctccttcgccaaggagttcatggatgatcaggccgctggcgctccgaagttcaaggagctgcaggaagagtacagccacccgcacctggagaccgttggtccgaagctgcgcgccatgttctcttggaacaaccagacggacgccgatgccgatatggccgagtccttcaacggcaagatcgctcgtacccaggttcagtgatttcgctgtagcggctgcatgttaagggccgctgaataacgtagtagcgcaatatgcgcgaaacgtgttggaagccaccgtctcaccgcggtggcttctttttgttgctgtgttgttttatgactgggatatttcgtatgcgggatcgcagtactgattgtcgggggagccgcacggctaggcgttggcccactttgtggactcaatgcttatttaggaagggacgggagtaggatagaccccagtttgcaggacaaaatccatgcacaaaaacacgcgaattcatctgcgaatggtagaaacccgagcgccgggaggcgttcaccccactacataaaaaggagtgccaagtacaatggctgcacaaatctggtacgagaacgacggcgatctctcggtcctcgaaggtaagaaggttgccatcatcggttacggttcccagggtcacgctcatgcgttgaacctgcgcgattccggtgttgacgtcgtcgtcggcctgcgtccgacctccaagtccgtcgagcacgccaaggagcagggtctggaagtcaagtccgttccggaagctgctgctgaggccgatatcatcatgattctggctccggatcagtaccagcgcaccatctgggccaatgacatcgagccgaacatcaagccgggcgcagctgttgctttcgctcacggcttcaacatccactacggctacatcaagccgtccgaggaccacccgatcttcatggtcgccccgaagggcccgggccacatcgtgcgtcgtgagtacgccaacggccgtggcgttccggtcgtcgtggccgtggagcaggatccgcgcggcgacgcttgggacatcaccctggcttacgccaaggctctgggcgctctgcgtgcaggcgccatcaagaccaccttcaccgaggagaccgaaaccgatctgttcggcgagcagaatgtgctcatgggcggcgtgaacaagcttgttgaaatgggcttcgaggtcctcaccgacgccggctaccagcctgaaatcgcctacttcgaggtctgccacgagttgaagatgctcgtcgacctcatgaacgagggcggtctgaacaaggctcgctggtcctgctccgacaccgcccagtacggcgactacaccaacacctgcatcgacgagcacgtgcgtgagcgcatgcagtaccacctgcagcgcatccaggacggctccttcgccaaggagttcatcgaggaccaggacgctggcgctccgaagttcaaggctctgcaggaagagtacggcaacgtccgcatcgagaccgtcggtccgaagctgcgcgccatgttctcctggaacaacggcaaggatgacgacgctgatatggccaccttcaccggcaagatcgcccgtggctgatgtggctcattcggctaatcgctgagtcttttacaagaccgctgcccttacgggtggcggtcttttttgtatgttctgtcgcatattgttctaggatagatatgtacggtttcttacggtttttctataggaagagatgtcatggtcactgcgactggtcccgcacctggttctgaaatgacaacgtcggctgaacctaccgaagaccgtagcacgtcaggagttctgcacgtcgccgcgattttcgcctcgcatatggtgttgcagcgtaacaagcccatcgccgtgttcggcgcgcttgatgccgattgcgccggacttgaggtttccgcggaaatccgcgatttcgatggttccgtgatcgtgcaggcgcatgcgtacgcctccaaagagatcaagaacggtttttcaccgtggcgcgtcatgctgccggcacagcccgaaggtggcccttacacgttgcgcgtcaccgcaggcaacgatttcatcgaatattatgacgtgcttatcggcgaagtatggctggccggcggtcaaagcaatatggaacttgaattgcgcaacagtgaagacgccgaggaagccctcgataactgtgccgatccgttactgcgcttctacaatgtgccgaaaaccggtgtgatcaatcgcaacgccgaacatgcggcaagctggcaggaatcatcgcctgaaaatagtggcgtaatgagtgcggtagcgtactattttgcgcgaaaactgcgtgatgaacttgattccgaccttccgatcggcattatcgactgttatatcgggggtacgtcgatcagttgctggacgagcgaagatgcactgaattccagcgaatccggacgcggctatcttgcgcgctatgagcaggcgatcgcaggtaaaacgcaggaacagttcgatttggagtacggcgaatggcagtcgcgttctgatacgtggaatgcgtcgatcgcagccgcccgcgaagacgatcctgatgtgacgtgggatacgctgacccaacagtatggcgaatgcccgtggccgccgccgatgacgccgacctcgcagtggcgtccgtcaggcgcgttccatgccatgctggagcgcattgtgccttactccttggcgggattcctatggtatcagggcgaggaagacgagccgtattgcggatcctaccgtgagttgctgggcatgatgattggtgaatggcgtgcgctgtggagcgaaagcctgccgttcctgatcgtgcaattgccgcagtggattgacaagaaggtcgacgagggcgacggcgatccgatgctgtggccggtgttgcgcgaggcccagtgggatgccgcgcagtccatcgacaatgtgttcgccatctgcactatggattgcggcgaatacaacaacattcatccggttgataaacgtacaccgggcgagcgtctaggcaattgtgcgcttcgccaagtgtatggtatgagccgtattccggtgtatgggccgactgtgctgggtttccgctgcgacgaaggcggccgcgtacgcctgttcttccggtacgcgcacggcctgcatttcagcggtactacgcccgacagttttggtgacgagttcgccaagagcctgccttcgctggtgcgtctgccggaacgttccggtttcgagcttgccggtgccgatggtgtgttccatccggcctacgccgcgattttcgtggattgcgatattgacgatctggtcaacgcaaaggtcaacgtggtcgattacaacgccacggaattcggtattccgatcaacagccgcagtatcggcacgattacgttggccacgccggaagtgccagcgccggtgatgatgcgctacgcatggcgtagctggggtccggcaccgttgtttaatgacaataatctgcctgctcacccattcaagctggacctgaccgatcacaccgactctgatcacgctgaataatcacgttagatagttgcgttgaacggctgcgtcacatgattgtcgatagttgacgatgaatagcgtgcgattgctgtgcttatagtgtgctgcaatcgcacgctttatattgcgattgaagtcctgctgatcgcacgtcagtcaaatacgaatcaaataccagtcaaataaaaaatcgttgaaaaatcaacgtttctgcgatttatgccaccaaaatcgcagaaacgaatcaaataaaatgcgctgcactgcgagcgcataggctattgccagaggtccgggccgaatgattccaggtatgcggtcagttcggcggccatctgttcgtcttccggaacgcgcggatggccatccgtgccgcaaccattgcgtgaatacaagaaatgttttacgtgaaactcgccctcagtgccgcggccgttgccgtggaagatggcgtggaacttaccgtcacagccaagagctacgtgcgcgacctgttctgcatggcagataaggtcgacgcgaaggcttcggtggccgagggcatggtctcgctgcttccgggcgaaagcgtcgtgctgcatatcgccactgccgatgccgcagcgcttgccgctccgggtgcgttcgcagccgccaacgtgccgcgttccgccaacgatccgaagcgcgaatggtgagcttccgcgagtacgccgtctactgaagcggtagaagagtggatagaggactactgaaatttcagttgacgtgttcggttgagtaaaaacataagttgaagcgccgccaaccttaagaaacgaaagtgttgtgaacgctgacttttcaagaggttggtcggcgcttttactgtacgatgtagatgaaccgtttaagttgtgatttaagttaagaagaaggacacggacatgcctattcaaaaaagcaaggtgacgatttttgacgttgccaaggcttcgggagtctctagtagcgccgtttcgtatgcgctcaacggcaagtctggtgtttccgatgtgactcgagacaaagtgttgaaggtcgcacacgaactgggatggaagccgaatggcgcggcacaggcgctggccaaggcgaagacgcagcgcgtgggtctagtgctgggttacgacccgaagctgctttccgtcgaatcctacatgatggaacttatttccggtcttggcgccgagctggaaaaatacgattattctctgctggtacgcatggccgtgggtgaggacgcgaagctttcgatcatcgatgattggattgctactggcaacgtcgacgccatgctgctcgtcaatgtcgagcttggagacccttgcgttgccttgcttgaggagcatgaggagatgccggtgcttgccattgccgatgcctccgtggttggcaatctgccgagtctgtcaagcgccgacgccgatgccgtgcgccgagcggtgcgatacctgtatgatctcgggcatcgtcagatcgcccgcgtcggcggtcccgaatcgcttgcgcactcgtatattcgcgattccgcctttgcggacgtcgcttccgagctgggcatgcgttatcgttgcctgcacaccgactacacgccggaaaccggtcgcgaggccacgaagcgcctgctggcgttctctgagcatccgacggcgatcatctacgacaatgatgtgatggcgttggctggccttggcgtggcagcttcgcaaggcatcaaagtaccggaggaaatctccatcatgtcgtgggatgattccctcatgtgcaccgcggcgtatccgaacctgaccgccatgggccgtgacgtggtcgataccggtaagcaggccgccggattgctgctcaagctgatcggcggcgagcgtgtggggcatctgatggaagggccgtacgaattgcgtgcccgcgcttcgaccggtcccgctccggcagcggaataagatgcgatgatgagttaatgcgatgatgaattaaaaaattgcgattgcgcatttgctgcgccccgacaagggcaggatgaaagcgagcagcgagccgatcgcggcgatcgccgcaagggttacgccatacaggattgcgacggtgttgccggactgcttcgacaggtaccacaggtcgaacggcgcgagtccccagaacagcccgggaatcgcggattggaaatcaaaatctgaaatctgaaatcgtaatctgaaatcaaaaagcgcccgtgcccctcgcttgaggcatgggcgcattgttgccttacgacttcaggcgcgcttctgtgtgatctgataggcggcgaacagcacgaccagccaaatcacgccggcgaccactgcgatgcgatagcttgcggagaagcacatcagcaccacgaccagcagcatgaacgcgatcaccacatacggcgtcaccttggcgaacggcagcttgaacgcaagtttgtcaagtgcttcctggcccttcaatcccttcaaatcattcggaccgtcgccggcggcgacaacgcgacggaacttaatttccgtaagcataatcatgatccaattaatcgcagcggcaatcgtggcaatcgacatcaaataattgaacgcgaaatcaggccacacgaacaccaccaccacggcgatcgcaatgatgatggccgacgtgatcacacccccgaccggaacgccgcgcttgttcaggcggcccagatacgcgggcgcattgccctgcttcgccaacgaatacagcatgcgcgagttcgcgtacaggccggagttgtacacgctcatcacggcggtcaagcacacgaaattcagaatgccggcggccgcatgcacgcccaccgagtcgaaaatctgcacgaacgggctggaattgccgtcgatcgtgctccacggcaccacggccataatcacgccgagcgcgcagatgtagaacacgagaatacgccagataatgccgttcgtggccttcgggatggtggtgcgcggattttcggtttcgcccgcggtgatgccgatgagctcggtgccgccgaagctgaacatcaccacgaccagcgccatcagcaggccggtccacgtgccgtccgcattgcgagacatcaggccatgcggcaggaatccgccgtcaacggtaaaccagttggcgaacgacgcgcgaatgcccgaagcggtcggcacattcgcgatgatcacatacaaaccgccgaaaatcatggcaagcacggccacgatcttgatgatggcgaaccagaattcaaattcgccgaacttgttcacgcccataagattcagcgccgcgatggccaccaggaacaccgccgccgacacccacttcggaatgttcgggaaccagtaattcacgaacgagccaaccacggccaactccaccatggccacgagcacgtagttgaaccagtaattccagccggaaataaagccggctcgcttcgaccagtactgcgtggcgtaatagctgaacgcgcccgccttcggatcctcgaccgccatttcggacagggcgcgcacgatcaggaaaatcgccagaccgccgatcagataggcgagcagaatggccgggcccgccagctgaatcgactcgctggaaccatagaacaggccggtgccgatcgcgccgcccaatgcgatcaattgaatatgacgattcttcaaagacttgcgcagcgtcggcggaaccggcacatcgtcggtttcgcgcggtttcttcgcaacggttgcgtcgctcatgaatgcttcctcttcttgggtgcctcggcaatattcggcaaaagcttgcgatcttggcgatgttgcgttcggcagtagtggtaggtgacgcgcctatggtttttggtatggcgcgtcttccccgattgtagctgtagcgcgtggattcggtttcatagtgttcaatagttcgatagttcaataaaatgaaggttttgggagcaatggttggtgctgcttgagcgctacgggctggaggtcgtcatggcattcatcaaagacatggtgcgtatgtggttgcatgcgtggaagcgattcatctccatcgcgctgatctcgttgctgggcgtcgccgtgcttacgggcatttacgcgggttgccgagacgcttttcttgcgacggatcgttttttcgacacccaaggattgcacgacattcaggtgttgtcgacggccggattgaccgatgacgatattgccgcgctccgtaaggtttccggtgtcgcgaaagtgcagggcgaacgttcgcaaaccgtgacggtcgatctgaacggtaaaaaaaccgtgaccatgcaggagatcggcacgaacggcattgaccagccgtatttgcaaagtggccgtatgcctgaaaagtccggtgagatcgcggtgacgcgcaaattcatcaaggattccggatgtaaaaagggcgaccatattacggtgacaccgcaggattcggcgtcttcttctgtgtccgattctgcagaatcggacacgcaggatggcaaacgtgccgcacgggtgaccgattctggtgaatcggacaatcaggcaccgagcttccccaccgaactgactattgtgggcgtggtgcttgacccgcaggatctcaccaatccagacggctattcgggtacgaacgcattccgttcctccgccaccagcgactacacgttctttgcgccgtccgacggtgtgaccggcagcatgtacacggccgtcaccattctcgtgaaaggcgccgccgacaaggactcgttcagtgacgtgtacgacgacaccgtcagcgaagtagctgaccgcatcgacggcacggtgcgaaccaatcgccagaaagcgcgtcatcaggaactactcgacgctggaaccaaacaaatcgacgaggcgaaagcgcaaaccgacaaacagttcgccgcagcgcaacagcagatcgacagcaatcgcagccagctcaatcagcaaatcgaccaaatcgtcaatatgcaggcgggcgcggctgcaggatccctcgacgaaacaacccgtgaaacactacgtgaaacggtaattgccgcaagcccgcaattagcggaagccaaagcgcaactcgaccaggcgcaatcgaaattggaccagcagaaaaaagacaccgaacggacactgcaatccaagcaaaacgagctggaagacagcattccgcaagtgcgttggtatgtgcaggaccggtcgcaaatcggcggattcagctcgctgaaatctgatctggaatccatccaatcgctgggcaacgcattcccgatcgtgttcttgctcgtggcggtgatgatgagtctgaccgccatggcgcgcatggtcgaagaggatcgcgggctgatcggcacatacacagggctcggctacgggcgtcttgcggtcgcctcacgatacctgttgttcgcgctgttcgcctgcctgatcggcggtggactcggcctgatcgcaggcttccttggcattccggcgttcctgctcgtcgtattgcgaggcttgtatgtgatgccggacgtacgcttggcatacgactggctgtacggaacggccggagtcgcgctgttcgtggtcggcgtgcttgccgcaaccgtgtatgcgtgcgcgcaggaaatgcgacagaagccggccagtctcatgcgtccgaaagcgccgcgtgcaggatcgcgcattctactggagcgtatcaagccgttgtggaatcgcatgagcttcctcggcaaagtcacggcgcgcaacattttccgtttcaaatcgcgtctgatcatgacggtcggcggcgtggccggctgcaccgcgctgattgtgtgcggacttgcgatcaacgacaccgttgccgcattgggcgcgaaacagtatcaggacgtgtatcagtacgatttgatggtggtcgcgaacgatgatgacgctgatgcgatgcggcagaaagtcgcttcggatggtcgcgtcacgtcgagcatggacgtgcgcgttgaatcgggtgatttgaccggcgattcggggagcgaaagcattcagctggttgccgtgcccgacagtgaacgcagcgagttcggcaagatggtcacgttgcagctggtgcgctccagttgggtggatggtgcggccgatacggtaagtctgggcgatgacggcgtgatcgtatcgcagtccgcggcaagcgcgatgggcgtcaaagcgggcggtatggtaacgctgaccaacggtgacgatatgcaggccgaagcgcatgtcagcgcggtgatccgcagtgtgatcggatcggacgtgtatgtgagcgaaacctattatcgccagctgttcgatactgctgcatccggcacgtcttccgcatcttccgcgtccgattctggagaatcggacaatcaaaacggcgaatccggtacctcgaatggcgcatcgtcaaacggccaacaactggtgtggaacgccatgtatgcgaagctcaaaggttcaggcgaatcccatgccgcctatgcggaaaagctggaagacgacgatgcggtcatgaaagccgtgagctgcgcgcacatggcggaaagcttcaaattcgatctgatgggtgcggtggtcgcgctgatcgtggcgctcgcgggcgggctcgcgctcgtggtgttgttcacgctcgccaacaccaacgtgtcagaacgtgaacgcgagatggccacgctcaaggtgctcggattcttcgacaaagaggttcaccactatgtgaaccgtgaaatgatggtgctcaccatgatgggcgtggtgctgggcttgcctctcggccgtttcgtcggcggattgctgacggctgcgttgaatatgcccgcactgtatttcgaagtggaatgcacgccgttgagttatgtgattgcggccggcgcgaccatggctttcgcgctgctcgtgcagttgttcgtgaatccggtgttggatcgtatcgacccgattagttcgctcaaatccgtcgaataggcgcatgtctgaatgtccgattctccagaatcggacaactagacgggtaaaagtgcgttacggttgtccgtttctccagaatcggacacttagagtgccggaaaggctcggattcgcgtttcagttcttcggataacggtagttgtgtggcagttgcgtggtgagctgcgggtccaggccgagttccttcaactgccggtcgatttcgcggcgcgcacgtttcacaagttcggctcgatattcatcgccatgtccggcattgctatgtgccgcatcgccatgtcccatcgttcccatcttctccagtgcgtccaatgtttccgccatacgcttgagccggtcctgatggtgcagcagcgcacgcacctgcgcatgttcgtgcacgatcgtccgccaatcggatggtgtgtgtgcaatctcccgaaccgcggtgaccggatgtacgtcggccacctgatatgtgatcgagccaagcagtggcattaggaacaccgtaatcgcgccggctgcgaccagtgttgacgcggtgtcgccttgcatggtgccgaccttcaccgccagtgacgtgacggcgacgatgatcggcagcgcggtcgtgcaatacagcgctacggtgacgcgatgatgcgatgacagcggattctcgcgtttgtcgagcgatagcgcaacatatacgggcaccgcgcgaatcagcatgagcattacgatgaacgcgacgagcagcgcgggtcggcctgccacggcgcgcacgttgatcgcggctcctgacaccacgaaaaacacaggaataaggaatccgtagccgacgccttccagcttcatttccagcgacttgctgccgtcggggatgatgtaacgcaggatgaagcctgcggcgaacgcgccgagcaccgcgtcaagttcgaacagtgcagaaatggtgacaaggaagatgagcaggaatgtggtcagtcgcatgagcgtttgcgatgacgtgttcgcgttttccgtaaggaaacggtacaggcgatggccggttttcagtgctttcgtgggtagcattgcgcacagtagacagatggtaaggaacgcgccgagcacgagcatggtctgccagccggttcgggtggatagcaggatggccatggcaaggattggtccgagttcgccccacgttccgtacgagatgatggcgtcgccgatgggggtgccttcgaggttgcgttccttgagaatcggcatgagtgtgccgagagcggtggtggtaagtgctattaccgtggcgatgccgttgatgccttgctttgcgaagaatggaagcagggtcacgacgagtccggcgagccccaaggtgatgatccatgtgacaaggccgactttgccttgatgtccggcgagtcgtttcgggtcgatttcatagccggcgagcaggaataggaacgccatgccgagctcgctcaagagtttcacggcgtcgttcacctcgattacgcccagtccgtacggaccgagtgcggctccggtgacgagcagcagcacagtttgtggaatgaaccttcctggaatcagctgcgccacaatcgggctgacggccgccaccgccatgatgatagtcaatgaaacgagctcttgcgtcatgtttctagcctagtgagtctgcatgacggtgttcgaggacgtgatgccccatgatgagccaaagggcactctggggcaaggttaagtttttgtaaattttatggggggggggggggtaattctatgagcgttactatctgtgcaaaatggcggaactgttttgttttgaagatggaactccttcttttcattgggggaagggtgggctttattcgagggttttaacgagggtgccaatgggaaagctccgatacgattctgaaccaagctgtttaggcaatatagggggagggaagaatggttgatggaaaattcaccgcaaaggagcgcgcgtatttggccagccttcccgcagtggaaagcgtgagcgcgtcgcgtattcgatattcagaccatttccgagtggaagcgatgtgccgttataacgccggtgaatcaccgtcagccattttccgtgaagcggggcttgatccgaaactgatcggctacaagcgtgtggagcggtgcatcgcgcgctggaagcagcaggaacgtgatgagcgtcgaaagggaaaaggggccatgaatcattatctgcaggatgttgaagacgatttgtcgatcgccgaactgcaaggggctacgcacgaaggggagacgaatgatccaactgaagccgacgaatcgcagaatatggcggcgaagcttgctcaggcgcaactgaccatcagcaaatgcgacatgctcatcgccaagcaagcgttgcgtatcgacgagctggaacgtgtgctgcggaagttcatccagtgatggacatgcggcagcagcagcgcggtcgggagccgtctttcgaagaagccgtcgacattgccgatgaggtgcggcagtggcgcagagaacgtaggaaagtcattgccatgcgggtggttgcggcgctgctgatcattcttgcgataggtatcggtgggtttcctacgtttctacagtatcagtcggcgcgggagctacggaatacgtcggaccggtccgcgcaggcggttgccggctggccttacccccaggctgatgaggcgtttgccgcggccaaagcatataacaggcggcttgcggcttcggggcagccgattctcggcgaggctcaagacccgttctcccaagtgcagggcagctcgcagtccagtgaatctggtgctgcggaatcaaatagcgccagtgcgaaggatgcggaatatcaaagtttgctcgattcgggcagcggcgtgatgggcaccatccgcattccgaagatttccgtacgtctgccgatctaccatggcacgtcgcagtcggcgctcgcatccggatccggacatctgtatggcagcagcctgccggtgggcgggcggagcacgcatgcggtgatcaccggccaccgtgggctggtcgaggcgatgatgttcacgcgcttggatgagatgcacgtcggcgactacttctacatcgaagtgatgggccgtacgctcggctacaaggtggatcgcatttcggtgatcgaaccgaatgacacctcgaagctgaagattgtgcccggcgaggaccgggtgacgttgatgacctgcacaccgtacggggtgaacacccaccggttgctggtttcggcggtgcgttccgcgattcctggagtggttcccgaggaacagaatgcggcaaaggacgcgcgattgattgcgattgcggtgtcggctggcgtgcttgtgtcggggatgctgcttgcctggctgcgtagacggccatggcatattcgcagacatgcggcttggtggccgaaacgtggctagctgttgcgttggcatgctgaggcgacatccgtacggttgcggacatgtgaataatgttgccccgtcggacgtcgggcttatgtgaatttcgggtagcgcagatagctgaaaacgttgttatcacttggtttcgaggctatttcatacccccgaatctcccgtgcttagggtgtacatatccattcccttttccttttattgttcaaaattggagcgccggaagtgtatccgcgtcggctggatgcgtgactggtgatgaagatgtgaatcgtgcacatgcacacggtgtgtaaggggaggtagcagatgaggcatacgcgaatacaacaggcaaagcccgagaggagctttgctgaacgaatagtcgccgtcatcgttgcgatcgccatgctcggcggcatgggctacgccaccacttccgccgcgatggcggatgataccgaacagaccttggaacaacaggccggcatcagcatgggcctgcatgattacaatcgcaataccatcaatgatggtcgtaccgtgggtgagacaagtcatggcaccaccgtggattccaatgtggaaccggcgagcaacacgaccatcgccaaaaccgcaggtggagacagcgaggatctgggtgcgcccacccatcgtaagtacatcagggacaatggcgacggtacctactggctgagtctggatgtgactggcgcatcccgcgcgagcaccgagaagaagcatcagccggccgacgtggtgctggtgatggattcgtccggtagtatggcaggtcagcgttggaatacggccacggccgcggccaccgctttggcgcagaagctgctgacttcggagaatgctgctttgccggttgacgagcaggtgcagatgtcggtggttgattttgataccactgccaggaacatggaattgggcgggacctattggacgacggattccgacaaagtatccacttcgttcagccagatggacgcaagttctgacaatggtggcggcaccaattgggaggctgcccttaaatccgcgaatggtttgagttcgaatcgtgcgggcgtggcgaagtacatcgtcttcgtctctgacggtacgccttccttccgtaacagctcgatgggtacttattgttcaggttggtctggtcgcaatcctgaatgtgcctattaccaggaaaatgatgtctacggaacgggtaagggggatcccggtggccggaatttcaatgccgcggtgaatgttgccaacaatcgctccggtgccgctttgtatgcggtgagcacgggttccgaggcgaacgaacaaatgagcaagttcgccaataccatcaatccgaagggcacgttcttcgacggcacggatgaggcgaagctgactgcagccttcgattcgatcatcgaggagatcaataggaactccacatatcaggacgtgctgatacaggacaccctgtccggatatgccgtcgcgactgactcgcatggaggtcagggtgcgttgacggaaatgtcggcccaaagtgaagacggcgatgatgtgactaataccgatcctgcggccaaaaccatgcaggtccactacgaccagacttccaaaaagctggagctgtcgttcccgcagggtaccaagctgagccagaatgtgacatatacggtgagtgtgttaatcaagccgtccgatgaggcgtaccaatatttcatcgagcattccggcaactatcctgataccggtgatcacgatactgatgctgaggggaacgagaccagttccaataaactgggcttcttctccaatgctgagaatgaggcgaacgtgctctacaaggtggtcaccgacgtcaacggtgaggaacaggtcggtgaccagaagagcgcggcctacagccgaccggtgattcaggtgaaagtgcccaagctcacgctggtcaagggcgtggataacaccaacgcgggcggcgacagcagcgagtatgcggccaaacctgaatactggaagctttccgctttgaagaacaacggcgcgtacggcatcgacaacaagaccccggaccaagtggtggctgctgacggcgtggtaaccaagaaggctgtcggccagacgatgctggctcctggaacctatatgttgagtgagacggcggacgagtccacacagtacaagtatttcggtggattcgcggcatctgactggacgtgtgcggatgcggaaggtaaagccgtcaaggtcatcaagagttccaatgggacgcaaaaagtgaccctgagcggtgacgctgaggtgacctgcacggtggtgaacactgcgaaaccggcttcgctgacgtggcagaaggtggacgagcataatcggagcaagtatttgggtggatccgagtggacgttgcaggggccgggaaccgatggtgagagcgtcaaggtgaccgacaacggcgcagcctccggcgatccgaagcagcttgccgacatggatactacgtccggtaacaacggtgagggttacctgcgtgtggatgacctcaagtggggtgaatacacgctgaccgagaccaaggctcccgccaactaccatctgcccaccggtagtgctgcaacgcatgctgtgagtgtgctgcccgacgccaaaacgaataccgacgtggagttcgttaaggatgcgggctcaatcacaaatgagcgcattaccgtgtcggcgctgccgttgacgggcgggatgacggatcgtcagtggctgttcgtcggcggtgtggtcggcgggcttgcggtgctgctcatcggcgctgccggtgtgtggaacggcaagaagcgactcgtctgaatcgctgtgcggggtcggaacgtctgccaacttgaaggcgttccgaccgataatccaagatttgcggattgcgggagcaagttgggttcccgcctcccgcgatcgcagaaacaagtaatcaaacaataaggaagagaggattctcatgaagatgaggaaacttttcgccggcatcgccgccgctgcgacgctgctcggtggcatggccctgggcgcagtcagcgcacaggccgatgacgctgctggtactccggtaacggacggagcaacgttcacgttcaccgctgaaaccgctgaacagctgaccaacgccaacctgaaagcatacaagattggcgattatgttcagtatggttccgacgagaacgttgcttacggtgtggtgacgaattctaagaataagactgccgttgactccgcgttgaaggctgccggtgtggatactacggattctgaggtggaccatctggccgcagccctgaatgccggcactctggatgtttctcctgctcgtccgtgggcttctcctgagaagacccgtaagtttgctaatgctctggagagtgaaggcaaactaactgctgagacgtcgttcactctgggcaggccagttcctgctacgaatggtagtgcggatgctaaatacactgctaccgcgaccctgcttgcaggtatctatgtgttcattgactctgcggttgccactggttctgtgaccaaggccatcccgatgattgtcgcttccggcacggtcgacaccgaaaagaaggccttgactgatccgattcagggcgccaacaccgtgaacatgaagaacaccaacaaccccgaaaagacaaaggaagtcaataagacttctgctgctatcggtgacactctgatctacacccttaccggcgttgtcgcgaacccggctccgaccgcgttcaagttcaccgatactccgagcaagggtctgaccatcaaggctagcagcttccagttctttacggaggatgctaatgcgaagcgccaagctgaacctgcgaacaacttcagtgttaccctgactggtgatttcacgggtaatggtaccgcatctttcgatgtcgaggtgaagaatccgtccgcttatgcaggcaagaagattgtggtcacctttgaagcagagatcaatgacgaagctgatgtcgagaatggtgtcgtcaacaagcttgacaactatggcacctcggttcaggtcccgaccacgtttggcaaattcgaattcaccaaggtggatcctgatggcaaaggcatcgagaacgttaccttccaggtaaaggacgatgacaccacgctgtactttgtgaagcagggggacggtttctacaagaaggctgcttctgctgacactcagggcgcaactactaatgtcaagactggtgctgatggcaagctgtctttcaccggtcttgataagaccaagacctacaccgtcacggaaactaagcgtgctagcgacgtctatcttgacatcaagccgagcttcaccgtgtccttcaacaatgacgcagctgttctgtctaagaccgccacttccgatccgtggggcttggtcgacaccactgccaagaccgtgaagaacgtgaagtccatcacccagctgccgctcaccggtgctgcgggtaccacgctgttcactgtcgtggcgctgctcgtggccggtgccggtgtgaccgttgcggttaagagccgtcagcgcatgcactaaactcacaaggcggtaacgccaaaagctatgcaggggtcaatccaaccgggttggccccttttgcgtgcgcccgcgacccgactatcctacggtccgacccagccccgcgggaacatctgtggggtgtcatccacatcagatgaggatatttttcgaggggacagtgcggattggtgtgacgtgttgcaacaagctgaaccgtggatgcgaggcagtcacagacagtctccgaagagaggggaaaaacgagggtatcgtacggcaagcgggccatagaatcataaagcatatccacgagaagtgagcaatggagacacaggacgggaggtatgccgtgcgtggcggtggagtattcagcgatgaggagattcagttgttgcgggaattaccggcggtggcgaatgtgacgcgtaatcgtatcacctattccgatgctttcaagcaggtgtgcaccatccgatatcttgcgggggaatctccgaccaaaatcttccgtgaggcgggattgccaccggaactggtcgggtacaagcgcatcgaacgcagcgtggctcgttggaaggccgccgccatcaaatcagtgagcggcaacgatcacctggatgacagcgagatcattgcgcagctcgttgaacggtacaagcgtatttttgtgacgaggcggaatcttgacaatatggcgtccggtgttccggattcgagtgttcccgttatgtccgaaggcgctgtcggcgcgcatgtttcgattggcgcgctcgacggtgatgccgctgacatcatcatcaagcagcaggcccgccgcatcgacgagctggaacgcgtgaacgccgaactgcgcggccaaatcgccgccaccacctgacccagactatcgttatgccatacgcaagcgagaaagtagcggtcaacctcgtgaatctgccatatataggcgagatagggcggcaggggggtatggcgaggcgaaaatacgggaataaggtggtcggatgggcacggttgaccacaaacgggatgcgccagtgccgcaaaatctgcgtacgtgcccaaaaacaaagcttcggcgggcgcaatgtgcggttcgcggggtagggtagtgaacattatgacttccgagaacaccaattccgcgggctcaagcgccgcgcacatcaaatccgtcgaaagcctcgaccagagcaatgaaatggagcgaggcctgaaaaaccgccatgtccagttcatcgccatcggcggcaccatcggcaccggcctgttcctaggctccggcaagtcgatcgcgctgaccggcccgagcatcattttcgtgtacatcggcgttggcctgattatgttcctgctgatgcgtgccatcggcgaaatgatgtacagcgatcctagccagcacacgttcatcaacttcatcacgcgctatctcggccgcgggtggggcaagttcgccggctggacatattggatcgtgctcattctgaccggcatgaccgaaatcaccgccgtaagcacatatttcgtaacgttcttcggcacattcggcatagacctgaactcgtggaagtggttgatcgaactgtgcttcctcgtagcgctcaccggcatcaatctgattgcggtgaaagtgttcggcgaggcggaattctggttctccatgatcaagatcacgctgatcgtcggtctgatcgtcaccgccatcgtgatgctgatcatcggcttcagctaccccgccacgcacatcgaaggcgtggacggcacggtgtcgggtgccacggtgagccttacgaatatcaccgacggcttccagctcgcgccgaacggttggatgaacttcttcatgagcttccaaatggtgttcttcgcctaccagctcatcgaattcgtgggtgtcacggtgtcggaaacgcagaatccgcgcgaggtgctgccgaaggcggtgaacgagctgatcatgcgtattctgatcttctacgtgggcgcgctgatcgcgatcatggctattgtgccctggcgtaactttcacgagaattccgatggctcgttcggttcgccgttcatcatggtgttcaaatatgcgggtcttgattgggccgccgccctggtgttcttcgtggtgattacggctgccgcgtcggcgttgaattcgctgatttattcggccggtcgtcacttgtatcagcttgcttcggattccgagtcgcctgcgatggcgcgtttggctgaggtttccgaccacaaggtgcctgcgaaggcgatcgtcgcttcgggttgcatgattctgttctccccgatcatcaacgcgattccgggtatttccggcgcgttcgtgctattcgcttcggccgccagcgctgtggtgattttcatttacgtgctgacgatgctcgcccaccacaggtatcgtcagagcagcgattttctaccggacggtttcgtcatgcccgcttggcaggtgtttgattggattgcgatcacgttctttgtgctcgtgtatgtcacgttgttcctgtcgacggacacgattggttctgcgattgccggtctgatttggctggttgcgtttggcggatattgcctgctacacgaacgattccagaatcgcgatcttaaggaagccttgcagcagtaacgtttgcaggtaacgcaggatacaagtaaggggcgtttgccgaacgtgagtgcatcacgtacgttcggcaaacgcccctttcagcatggtctttgcgcgaatccccattacgggatccagcgcaaatcagccgatatagtcggcctcgttcgtcgggctggacggcacggcatgatcttccgtaaccttgcccaagccagacaaatacgcctcgcgacccgcttcgatcgccttcttgaacgcgcgtgccatcagcggaatattgccggcggaagcgatggccgtgtatgccatcaccgcgtccgcgcccatttccatggcttccgcagcctggctcggacggccaataccagcgtcgatgatcaccggaacattggagttcttgatgatcacttcaatgaaatcgcgtgcacgcagacccttattcgagccgatcatcgcgcccagcggcattacgcaagccgcacccgcgtcttcaagacgcttcgccgcaatcggatcggggaacatgtacggcatgaccacgaagccttcttttgccagctgtttcgtggctttgatggtttcctcattgtcgggcagcagatacttcgcctcatgttcgatctccaccttcacgaagtccgtctggcacacttcgcgggcgagacgtgcaatacgcaccgcttcctcggcattgcgtgcgccggacgtgttcggcagcatggtgatgcctttcggaatgtaatcgagcagattgttttcggtggtacggcagcgacgcaacgccatggtgacgatctgcgtgcccgcgttctcaatggtcgccttgatgaggttcagatcgtagcggccggaaccgaggatgaagcggctcgtgaacttgtgtccgccgaggatcaacggatcggcgtcgccggtggcgatttcgtcatacgcgtgcgcatccggttccggcagcagtgcggtgttcgtggtggtgccgaccagctcgtcgagcgtggcgttcggtgccgccgcgaagtctttttccgcggtggtgatcgtgttttcggtgctcatggttaatccttactatgcgattagtgtcgtgtcattcgttgcgatttgcgatttgcgattgcaattgcaattgcgtttgtgtttgcgtttcgctgtcaggcgtcttcttcgccgagaatcaagcgagtgatcatattggcttcatggcaggcgaccacacccacgcgcggtgccatcagacctgcgcccggcaccggagcggtttcgccgtcgccgcagaagtagaaattctttgaaacgcgacgagtattcaccaaattggagctgcggaatcccgccattccagaagcgctcaccagcttcttgtccggcagattctcaagcacggcattcaccagcatcgtcttgttttccggcacgtcgaacgcttcgcaaataatatcctcattgtcgaacagtgtcggcacgttctcgtcggtcactttcacggtatcaatggtgatatcgataaaaggattgatctgacgcaagttactgcgcaatgcttccgtcttgtactgcccaagatccttcaaaaaatactgctgacgattcagattcgtcatatccacgcgatcaaaatcaatcaaatgcaggtgaccgacgccaatgcgggtcaacgccaccgcaatggtcgatccgaggccgccgcagccgcaaatggccacgtgcgccgcgtcgagcttgtcttgcgtggctgcggtatgacggtcgagcagggccgcacggatttcttcgcggctgacgagcgtggtcgggtcgggctggttgtcgaaagcgtgctggcgggcgtcgatctgcgcctgcgatgcggatggttcaaaagtcatggttgttctcgtattctcgttttccgttcgtgcgttgtttttgccgggttggttgtgttttgtatgttcttgcgattgttacgcgtgcattgtgccggtcgtaatcgcaagaaattttgaaagtggttcagccgccctgcacgaacgtgacgatttccaacgtatcggtgcccttgagctgcgtctgcgcacgctgggtgcgaggcacgatctcaccattgagctcgacagccacgcggtcggcgcgcaggcccttgctttcgatcagttcggccacggtgatcggcgtggcgatgttctcttccttaccgttgatgatcattgcggttcccttctgtgtctgtcgtgacacatgcttcctgcactccaaatgtccgtttctggtgaatcggacatccggaggttcattgttggtctttaaatgtccgattctgcagaatcggacacgcacggcatctatttcagtccacggatgtccgtttctggtgaatcggacacgtaggcgcttgttcgagccgcttgtgcgtccgtttctgcagaatcgggcactcaaggttggtacgaaaaaagggtcgccgaaggaaccgtaccctatgaggtggtgcgcccctccgtgaccctaatcacgcgatattcggttatcgcgaacggaagatgagatacgtcttgcggcgtgaacaacccgtctccttacggcggcattacccgcatcaagtcctcggtcgaagctctatgagctccctctcagcctttcggctcccgttcggttgtgccttcatcttcgcgcacgcgcccgacaagcttgcgccggttcacgttgggttagtcttgatgtgaacatgtgcgaatcggctgagtgcttgcaaggaaggggaagatgatgatggacggcgagttggcaggatttgcgattcctcggcttggtatgggaacgatggctttggcgattgaggggcgcccggatcgcgataccgcgattcgtacgattcatgccggtttggacgcgggtgttcgctatttggacacggcttggtcatattatctgccgagcgagcctggcaccggcactgcggaagaccttggctacggcgaaaagttggtgcgtgatgcgctcacttcgtggaatggcccccgagatgaagtgctggtcgccacgaaaactggctatcgacgcaccatggaggtccccgcttttgttgctcctgtgtccgattctggagaatcggacaaacagggtgccggatttggggtacagatgtccgattcaccagaatcggacactcaggggcgggattctgagggatgcagccgtcggcctggcgaggaacgccagcatttgcaggcggcgggcagtcaatacgggtggatggcggattcgcgccccgaaaccatgattcgtgacgccaaggagtccgcgttgcacttgggcgtcgatacgctcgacctgttgtattcgcatggccccgatcccgcggtgccttacgaagaccaatgcggcgcgttgaagcagctgctcgacgaaggcgtgatcaaatatgcgggcatctcccgtgtgaataacgagcagatcgatcttgcgcgcggcattatcggcagcggcttggtcgccgtgcaaaaccagttctcgccgtcgcatcccgatccggaacatacgatggagcattgcgccgaattggggctcgctttcgtctgttggtcgccgctcggcggattcctcgatacgttcgatcagagcgcgtacgatccgttccgcacggttgccgcgcaacgtggttgctcctaccagcgtgtggtgctggcgtgggaattgacccgttacgaacgtctgttcaccattcccagcgctcgcaatccgcaggaaatcaacgattccttcgctgcaacgcaacttcagctcactcaagaagagcttgcgatgcttccttgctgattatcgtttccttttttgggcgttttcctgtacttgcacgttgcgatcgaaaaatgtttacagtaaaagatattatcgagacataactgatgggcatcgaataaggcgaggtgaagcgtgggcttcgagcgggagtcgtttgacaagctgatgaaagtggtctggggtaagaagtctcagatgcagcaggcgatgtcgcgtgattccaagggcgagccattcattattcgcgagcttgagttcaagggcgcgcaaacgccttcgcagttggctaccgcgttgaaggtcacgtcgggcaggatttccacgctgttggctgcgttggaaaaaaagggtctgatcgagcgtgaggtcgatcccaacgaccgacgcattgtgcatgtgaatcttaccgagcaggggcgggcgaaggccaagcagcagcgcgaggatatgcgcgacgccgtctgctgggtcttttcgcagatgggggagcgtcgcacgcgcgaattcgtggatcttaccgaggaatttgccacatacgtgaccatctgcatccctggccagccccgccccaccgccgaagaagtaaagcaagccttcgcaaaagccgaatctgaagatcctgcgtagggactgcctaccacgtaagcgtgcgcctcacatgtgccgttcgcgactgtaagcttggccaaacggcctcgagtgtgtcgcgaatggtatatgttggccgcgcgcgaccgagctgagaagaatcgctctcagcaaatacacagaaatatgagattgtcttacactataagtaattaaatatcgtaagacaattcaataggacttatgtaaatcattaatcgcaattcgatcaactcatgtagttgatccaaccaatccatcaatcgcaaaaacttcaaacgcaacacaagagaaggaatccaagcatgttccgcattatgcgatacctctccaaagcggagataggccagatgttcattgcactggtcagcatcgtcgggcagatctggcttgacctgaccctgccggactacatgtccgacatcaccaccctcgtggaaacccccggcagtgaaatgcacgatatttggatcgccggcggcaaaatgctgcttatttcgcttggatcggcagcatgcgccatcatcaccggctatttcgcggcacgcatcggcgcatcgttcagccagcgtctgcgttccatggaattccgcaaggtagaatcgttcggaccggctgaaatgagccgattctccacagcctcgctgattacgcgttccacgaacgatattacgcagattcagatgttcatcaccatgggattgatgatgattgtcaaatcgccgattatggcggtttgggccgtctgcaagattgcgggagacggtctcgaatggacgctcgccaccggcatcgcggtggtggtgctgctggtctccatcacgatcctcatggttctcgtcatgccgaagttcaagtccatgcagcgactgaccgataacatcaaccttgtggcgcgcgagaacctcaccggcctgcgcgtggtgcgcgcctacaatgccgaggattaccaggaagccaagttcaccaaggccaacaaggaactcaccgacacccagctgttcaccaaccgtgccatggccttcatgatgccgttgatgaacaccatcatgaacggtcttatgcttgccgtgtactggatcggcgcctacctgatcgacgcggccgacgcggccgacaagctcaccaccttctccaacatggtggtgttctccagctactccgtgcaggtgatcatgagcttcctgctgatgagcatggtgttcgtgctgtggccgcgagcggacgtgtccgcacagcgcgtgctcgaagtgctcgacaccgaaccgctgatcaccgatggcacccgcagtgatgctggcgaagcaggcaagcagggcgaaatcgaattccgcaatgtttccttcacctacccggattcgcgtgaagccatgctcgaaggcatcaacttcactgccaagaagggcgaaacggtcgcgttcatcggctccaccggctccggcaaatcctcgctcatcaacctcgtgccgcgtttctatgacgcgacgcaaggcgaggtgctcgtcgacggcgtgaacgtgcgcgactacacgctcaaggcattacgagacaaaatcggatatgtgccgcaacaatccttcctgttcaaaggcacgatcgcatccaatgtcagctatggcgacaatccgctcgacaccaccgatgccggcatcgtcgacatgaccgatacctcgaccgcggccggcagaaagcgcgaaaaagagctgatcgcaacgcaaaacgagcatcgcacactcacttcggaacagcgcgccgacgtgcgcaacgcatgtgaagttgcacaggcgaccgaattcatcgcaaccaaggaaaagcagtacgattccgcgatttcgcagggtggatcgaacgtgtcgggcgggcagaaacagcgtctgtcgattgcacgtgccgtctatcgtcatccggaaatcctgattttcgacgattccttttccgcacttgatttcaaaaccgaccgtgccgtacgcgacgcgctcgccaaggaaacgaaagattctaccaaactgattgtcgcgcagcgcatcggcaccattatggacgccgaccgcatcgtggtgctcgacgacggcaaggtggtcggccaaggcacgcatagcgaactgctggaaaactgcgatgtgtaccgtcagattgcgcagtctcagctgagcgaagacgaattgaacggcggcaagtcgggcgaaagcaagctgccgggcgaaaccggcaaaccgattgaaaccggcaagccgtccgtcgaaagcgaattgaacgaaagcgagggtcgctgatatgccaggaggacctatgggacgcggccgcggagccgttgaaaaaccgcaggatttcggtggtgtgatgaagaaactggtgcatttctgccgccactacattcccgccatcattgtggcgctcgtattgggcgcgatcggcacggtatgccagatcgtcggtccggacaaactcaaggacatgaccaacgagatcgccaaaggcctgcctgcgctagtcaatggcaagccggtgctcggtgcgatcgacatggacgcggtcacgcacatcgcatggctgctggtggcgctgtatgtggggtacgcggtgctgtgctacgtgcaaagctggatgatggcgaacgtcacgcagcgcaccgcacaggagctgcgcgaagccatcagcgtgaagatcaacaagctgccgctcaagtatttcgacaaggtcagctacggcgatgtgctcagccgcatcaccaacgatgtggacgccatcggccagacgctcggccagtcggtcggctcgctgatcacgtcggtcacgctgttcgtgggcgcgctcatcatgatgttctacaacaatgtgattatgacggtgtgcgccatcgcttccagcctggttggcctgctcatcatgggcgcaatcatgaaggtttcgcagaagtacttctcccgtcagcagatcgcattgggcgatgtcaacggtcacgtcgaagagatgtacgccggccacaccgtggtcaaggcgtattgcggcgaggctgattcgattcgcgcgttcgaaaagtacaacggcgatttgtacgattcgggatggaagagccagttcctttccggcctgatgatgccgttgatgaatttcgtcggcaatttcggctacgtggttgtgtgcgtggttggcgctgtgcttgcgatggatggcaagatcgagtttggtgtgatcgttgcgttcatgatgtacattcgactgttcacccagccgctttcccagttcgcgcaggcattccagaacctgcagcgttgcgcggccgcttccgagcgcgtgttcagcttccttgaagagccggagatggccgacgaatccgacaagcaggcgctgctcggcgtgaacggcaaaccggtgcgcggtgacgttgagttcagtcatgtgaagttcggttacgatccgagcaagacgatcatcaacgatttctccgcttcggtgaagtccggtcagaaggttgcgattgttggtccgaccggtgccggcaagaccacgatggtgaatctgctgatgcgtttctatgagatttcgggcggttcgattgcgattgatggtgtggatacgaagtccgtgccacgctggaacgtgcatgaccagttctccatggtattgcaggatacgtgggtgttccgtggaacagtgcgtgaaaacatcgcgtattcgaagccggacgtcaccgacaagcagatcgaggacgcatgcaaggccgtggggctgcaccactacatcatgtcgctgccgaatggctatgacacagtgcttgacgacaaggccacgctttcgcagggtcagaagcagttgctcaccattgcgcgagccatggttgaggatgcgccgattctgattctcgacgaggccacctcttcggtcgatacgcgtacggaagagctgattcagaaggccatggacgcgctgaccgtggaccgtacgtcgttcgtgatcgcgcaccgtctgtccaccatccgcgatgcggacatgattttggtcatgaaccatggcgacatcgtggaaagcggtacgcatgaggagctgctcgccaaaggcggtttctacgccgacatctacaacagccagttcgccctcaccgactgattcgccgttctggctggctgattcacaggagccgcacgtccccaaagacgtgcggtctttgtttatttcggctggtattcggctgttatgcggatcgcaggaagagttcggccgggaagttgcggctgactgcgatttggcgggattcgtccaatgttgcgtatgtgaaatcgaacgtgcgttgcagttgtgctacgtcggaaacgaacagggccgtggccaggccgtccgcaacggcggtggggtagtcgcgtgcaagattgagcgttgcgtttgctggaacgtatgcccagctggcttcggtttgttgcgcgggcagtccgtcgatggcattgagcagatgatgaatggcgatttgggtgcgctcgttgactgccacgttccaatggcgtcggctgggtgcgcttgcgcacaacgctccgttcgcaatatgtgcgattccgattgcgtgggactgatcttccggatcctcaagtgcgacggaaatgggctgttccgcatgaatcagcgaatcacctcccgcatcaatcacgaattgtgacgactgcagcatgcgcccgagcagatcgacgagatagcctttgccgcaggcgccgaaatccaactgcatcggctcatgcgttaccaatgtggttccgtggcgggtcacatcgcgtccccaaacggcgcgtccgcgcaatgcgcccaaatgttcgggcgcatcttgtgtaaccgtgaaactcagcgacgcatcgtatccaagtcgaatcaaatcctcgccgacgcacggatcaatcgcgccggaagtggcggaaaatagcgcatcgtacagatcgaacagcggcgcgcaccaatccggaaaatcgaaacttccgccatgctcggccttgccgatcgccgcaatcagcgaatcattgcggaatcgagacagcacgtgttcgtaatcctcaatgagcgattccattgcggaacgcaccttgtcgtcgatcggcgaatccacggaaatcaccataccggtgccgagcgccctataaaacgccgtgacaaacggcatgcgttgcgtcaaagaatccatgcctccgatgctacccgcccatttcctccagctactgggggaaatgggactttcgcgatagggcgcatggtacagttgccggcagggcgtcaacatggaggttgatatggggaacgtcgagaatgcaagtgcagccacgtgcacaacaaaaacggtgaagagcctgccgatgcccaaagtctgggctttcgccgtcggccaattcggctgggcgctactttccggcattatttcgaattggctcgtctacttctaccagcctgacagcgaaaccatctcgcaagggcaaaccgtgttcgtaccgcaaggtcttgccgtactcggcgtggtgaccgtagtcggcggcatcaccgcgttcgcccgcttcttcgacgcattcgtggatccggccgtggcaagtctttccgaccgttgcacatcaaaatccggtcgtcgcatgccgttcctcaaatttgcggcccttccgctcgccctcgtcaccgtgctggtgttttggagtccaatcaacgatacgagctggatcaacggcgcgttcctgttcgtcacggtgatcggctactacattgcgctcacgttctactgcacgccctacaacgcgctgatcgccgagcttggtcacgattccaaacagcagctcaccatctccaccgccatttcgttcacgtgggtggccggcaccgccattgcatacgtggcaccggtgatttgggctggtttcgtgccgggcttggggcgtgtgaacgccattcgtttgacgttcaccatcatggtggccatcgcattcgtgtgcatgctggttccgccgctcaccatcaaggaacgcgattacgtcaactcgcagcccacgtccgaatcgaccatcgaatcgttgaagcagacgttcggcgacggcgaattccgcaagttcgtctgctccgacgtggtctattgggttgcgatcactacattccagactggtttgccgttcttcgtgacgagcctgctcaaacttcccgagaccacgaccaccatctatttcgtgctcatgaccgcagtgtcggtgctgttctacatgccggtgaatgtattggcgaatcgtgttggcaagaagcggattctgctggtcgctttcgtgattttcacatgtgcgttcgcgtttgcgggcgcgcttggctccggtctgctcgctgcgattccgccgatggcgcagggcttgattctctcgattgtcggcgcgattccgatggccgcgttcggcattcttccgcaggcgattgttgcgaatattgccgacgcgagctcgaaaacgaccggtcaggatcgtcagggcatgttctatgcggctcgcacgtttgcgatgaagatgggtcagtcggtggcgatgctgctgtttaccggcgtgagcacgattggcatggcgtcgggcgccggctatcgcattgcggctgtttgcgccgcggtattgtgcggcatcggcggtgtggtgttcgcgttctacaacgaacgcaaggtgcttgacgtgctcgaatcctgattccgtccatgcgcccgctggcctcacgattttgtttttcgttgctttttcggaatcgtgaggtcaccagggcggaatcgtgaggtcagaaagtccagctccatcccaaatcccccaattcccgaatcttccaatcgcacgaatatgcatggagaggaacggcgaaagcgcctcaaaaaatcactatgtgagacgactcgcgcggattacagaaaagaagaatggcggaattccgccattttaaaggtttctacaacaaaactgccaaaaaatcaagactgttctttcgatttttttcgttttatcttgtgaagtcggtgcgcactgtgcgtatggcaaaggtggcgcactcgtgaatcggattgtgaacggctgagagaggaagcggtcttatgtcatcctgcgatacgcagcgggctacaagtgtgtccggtcgccttgtcgcgttcattgcggcattgatgatcgcgttgaccacgcttttcgcgactaccgcagttccgcagccggcaattgccgccgatgacggtcaaacgaattttgattcctggactgccgctgcgaagaacatcgaagaccagcttgcgactgccgaaaaagactacaatgacggcaattacggtcaggctggcaccgatttccagaccgcgcattggatcggttacgacgcatccaacttctcgaaagtcgtcaacgacaccatcagtgccgacaagcagaaggaactgctgcagcaattcaccgatcttgaaggtcttgcctaccagcaggaccaaggcgacgccatcgcagccaaaatcgacgcgctgaccgccgaaatcaacgcaaccgcgcaaacgcttgacgcgaacgccgacctcgccaatcctaaggaatatgcgaagcagcgtgccgcgcaaaccgcggaagagcgcaagaagctcgacgcggccaagaagaattcatccaaaggcaaaggcgaccgcacgtggagtgaggttgccagcgaaatgaccgtcattctcgaccaggcatacgaggctgccgctgccggcaagggcgacgaaggtgccacgctggtcaacaacgcctactaccagtactacgagaagctcggcttcgaaaagaacgtgatgaacgtgatttccggcgatcgtgtttcgcaggtcgaataccagttcaagatgactcgtaagatcatgcgcgacggcggttccgacaaggaaatcaagcagcatgtcgacgatttgaaaagctggcttgtgaaagacgcggccattctcgacggtggtgcgtccggcaatgtcaacggcttcaccaaactcgtcaccagctccgccggccaggcgttcctcattctgatccgtgagggtctcgaagcgctgctggtggtggctgcggtgatcgcctacttggtgaagtccggcaacaagcgtttcaccaagtggatctaccttggtgtggtcgcaggtctggccggttccggtttggtcgccgtactcttcacgttcctgttcggcggttccggcccggttcaggagatttccgaaggcgtgtgcgcgctgatcgccaccctcatgctgctgtggaccagtaactggatgctcaacaagagctccgtggaagcgtggaacaactacatcaggaataagaccgaagcggctgtggccggcgcgcaaagcaaggtcgaatccggtcagagactgggcttgggcatgatcgcctcgcttgccatgctgagcttcctcgccgtgttccgtgagggcgccgaaacggtgatcttctacgagtccatctactccatgagccaggatgcgcacggcatgtgggttggcggtctggccgccgccgcggtgctgatcgttatcttcctggttctgcgattcacttcggtgaagattccgatcggcccgttcttcctcgtaacttcgattgtgatggccgtgctggttgtgattttcgcgggtggcggcatccatgcgctcatcgagggtgatcttattgaaggcacctacttgagcagcgtgccaactaacgattggatcggcttgtatccgtacgtcgaaacgattacggcgcaggtgattgccgcgatcgcggtggttgtgctgttcgtggtcggttccatcaagaaacacaggatgaagttggccgcgcaggcggaacaggctaagtaagcgccaatcaataatcacaagtaaagatttagagatttccataagtttccaacgttcctcaaggaaccaaagaaaaggaagagaacacaatgaagaataagaagatcgccgccctgctcggcatcctgttggcaggctccatggccttctccctgtccgcatgcggcaactccaacgattctgcatccgatgccaagtccgacacctccacttcggacaccaccgacaaatccagcgattccagcgctgatgacagcaacggcgccggcttcgaagagattcaggtcgacgagaagcactccgatcaggatgttgacgctctgaccgtcaacgccgtgtacttccagccgatcgatatggaaccgtccggtatgggcctgaaggctgccgacgcttccttccacctggaagccgacatccatgccaacgagaagggcaccgagctcggctatggcaagggcgacttcgtgccggacctcaccgtgaactacgagatcatcaacaacgcgaacaacgagaccgttggttccggtaccttcatgcagatgaacgcttccgacggcccgcactacggcgccaacgtcaagctcgacgaggctggctcctacaagctcgtgctgaagatcgaatctccggagaagaagggttggatgctgcatgttgatccggagaccggcgttaagggccgcttctggaccgagccgctcgaggtcactttcccggagtggaactacaccccgcaggagtggtgatctgaaacgtgagttccggcacatgccaagcgaaatggtttggatgtaagcctgaattcatgttgagattcaactcgtggttaacgccgttcacgtatcgcgaaacgtatgcaagtagcgcgaatatgggtacggcgttcgcggttgcctggatagtcgttcgacgcgctcaaggccgtttggccgagcctacggtcgaacaaccatccaagcaaccgctctcttgcgtttgaggggatgcgcttttgggagataacgcgcttttgggggaatcttggtaagggggttccttttgcgtgccgaattcactaggctttgacagggatatacaacgaaaggtgtgagatgctgacgcagtacgtcacggtgttgcagggaacgctggcaccggctttgctgattatggcgctgaacgtgatgctcacggtcggtgaggggcgtgacaagccgtcgagcgcgtactggcgtcttgcgggcttcattattggattcgcgggtgccattgtgttcgccgcgttgcgtgcatccgcgatgattaatcagcgtacgttcgtcaattaccccacgttgtggtgttgtgtgattttcgatatcgcagtgctcgttgttgtgctgttcgcacgtcgcatcactacgaattggcatgatcatcgcgcgttgctcgatattgcgaatgcgattggcgctcttgcgattgcctccaccaccttccgtgcgttgcctgatgttattttgcgtttgacgattttcgtggagccaggagatccgatcttcacttcggatatgctgcttcgtgcgcttggtttcgcattgggtgcggccactgcgattgttgcagcgttgattttccgtacgatgcgttccactgcgattcgttggtcgttcaccacggccgtgctgctgctgattgcgctgctgtttgtctcgcatttcactgatcttgcgcagattctgcagtccaagcgcatcgttcatttccctacggaagcgttcctggcgttggtgtggtgcatcaatcatcagcgtcatatggtcattgccatggtgttggtgttcatcattccggtggtcgccagcattgtgatgggcttcaaaatcaagccggaaggcgcaaacgaggccattgtgcgatcgcatatcgcgttccgtcgccgtgcgaaggcggccggcgcatggagtcttgtcgcgatgatcggcatcacgttcgcgctcacgtatggtgtggcgcaaacgaagaaggtcattacgctgtctccgcctgaggattattcgctgagcgacggcgtggccaccatcaaattcagtcagatcaacgacggtcacctgcatcgcttccaatacaaggcgaaagatggcacggtaatgcgtttcatcatcatcaaaaagaatggtggagcgtacggtgtcggtcttgacgcatgcgataactgcggtgacgcgggctattacgagaaggatggcaagatcatctgcaagaagtgcgatgtcgccatcaacctcgccactatcggattcaagggcggctgcaatcctgtgccgttcgattatcaggttgaatccggcaaaatcgtaattcaaacttcgacgctcgacgcattgtcgacgcatttccagtgagcggaaagaggtagtcatgttcttttttcgaatgattttccgctcgttcagcaggcagttcaaacgcagactgctgatcgcggtcaccgtgtgcctgtcggccacggtcagcgtggccatgctgggtgtggtgttcgacgttggagacaagctgaacgcggaactgtcgacgtacggttccaacatcaccgtgcagcccaaggccgatgccgtcgtcaacgacctgtacaacacggggggtgacgcgaatagcaacgcttccggcacttccgaatccgatccgaccacatttctgaaggaatcggacgcaccgaagatcaaaaccatcttctgggcgttcaacatcacgaattttgcccccgaacttaatatccatgctgacgtgaactgcgcgtccgaatcggtggattccagctcctgcaaggcttccggcgtgccgatcgtgggcacatggttcgccaagaccctgcatatggattccggtgaatccacggtggcgggcatgaacggcatgcgttcgtggtggaagcttgacggctcctggccgaaagacgatagcgcgcaaggcctgatcggcaccacgctcgcatccaaactcggcgtgaccaagggagataccgtaaccctctacaaaaccaccgccgacggcagccgcaacaagcagcggatcaccatcaccggcatttacgattccggcgatagcgacaacaatgcgatgtacattccgtcatccaccgcgcaggtgcttgcgaatctgcctgattccatcgacaagatcgaagtcaaggctctgaccacgccagacaatgatttggcgcgtaaggcgtcgaagaatccgaatgcgctcacgcaagatgagtgggaaacatggtattgcaccgcgtacccttcgtccatcgcctatcagatcgaagaggtcattcccggttccgtagccaagcaggtgcgtcaggtggccgcattacagggcgatgtgctgcagaaaacgcaggcggtgatggtgctgatgaccgtgctttcgctggttgcggccgctatcgcggtggcgaatctgatggccgcctcgattggtgagcgcagttcagaattggcgttgctgaaggcgattggtgccaccgatggtgcggtttctcgcctgatgctcgctgagacggctgtgatttcgttggttggtgcgattgtcggtgcgctgttgggttccggtgttgcgcagattgtgggacatgtggtattcggttccggcattacgatgcgtccgatggtgtttgtgctggtgtttgtgctgctgacgcttaccgtgctgatcgcctcgttctcgtcgatccgttcgattctgggactcaaacctgcggaggtgttgcatggccgctgatgtcaacttgagttccgtaaactcggccgcggctgcggcctcggtcacgaacggcacactgtgctgttcgtctgcggaggtgttgcatggtaggtgagttcaagacagtccgtaaggggcatgagatgactaatcgcaagatgttcttcaccatgctgtggggcgcggtgttccgtcgtcgttcgcgggccgttatggccgtgatcgcctccatggtgggcgctgccacgctgttctgccttgcggcgacgtgtattgccgttccacagcagatgaacgaggaaatgcgtgcgtatggcgcgaatcttatcgtcacgccgtccgaatcagccgaaaagtcccacggcatcgacaccgataccgtcaaagcgttgaaccagatggtgaaaggctcgtacagcgcccgttccgccgcttaccggtatgaaagcgtgcgcatcaattctgcgccatacacgctggctggcatcacaaccaaagacgtgaaggcgctcaaccatcattggaacgtgactggcgattggtccagcaaaggcaacgtgatgctcggccgtgacgtggcagacgcgctcggtgtctccatcggttcgaccgtaaccatcggctaccgcgcatccgacgatgcgcaggattccggcgctcttagccaaaccgaagcgcaagtcaaagaaaacggccgcgtttcgtccgacattatggaaaacaccggcactgaattccgtgtcggaggcatcgtcgatacgggcggcagcgaagacgaaatcgtctacgcggtcaacgctgacgtggccaaactggccggtttcaagcgtggcgcggacgtgatcgaatattccgtcaatgcggtaggcagcgaactcaacgatgtcgtcaaatcgatcaatgcgaatccgtcaaccggcgtgaaagcgcagaccgtcaccaaaatcacctcatccgacactcgtatcatcgccatgctgcaaaccctgttctggatcgtgtcgctggtcgtgctcgtgctgacgtttgtgggcgtgggcaccaccatcagttccatcgtgtctcagcgacgcaacgaaatcggcttgcgcaaggcgttaggcgcatcctcgcgcgccatcggcatcgaattctatgtggaatccgccatctacggactgattggcggcctgatcggcactaccatcggctacctgctggcccgcgtgctgtgcgtatccgtattcgaacgtgccattggcttcaactggctattgggcgtcgcttcgctgctgttgagcgtgctcatcgccgtcatcgcatccatcccgccggttcgccgcgcaacccgtatcgaccccgccatcgttttgagggaggaataatcatgagttccgaacatacgttgaatacgttgcttgaattggatcatatttccaagatttacggcgatttgcgtgccgtcgacgatttgactttgaccgttccgcaaggtgaatggcttgcgattgtcggttcgtcgggttccggcaaaaccacgctgatgaacatgattggctgcatggacacgccttcaaagggttccgtcatgctggaaggccgcaagttggaggatttgaacgccaagcagcttgccgacgtgcgtaagaacatgatcggattggtgttccagaagttctatctggtaccgcatctgacggctgtggaaaacgtgatggtggcacagtactaccattccgtagtcaacgagcagcaggcgttggaagcattggaacgcgtcggtctgaaggagcgtgcccaccatctgcccggacagctttccggcggcgaacagcagcgtgtgtgcatcgcacgtgcgctcatcaactgtccgaaactgattcttgcggacgaaccgaccggcaatttggatgagaagaacgagaaaatcgtgcttgacctgttccgtcagctgcacgagcagggcactaccatcatcgtcgtgacccatgatgcgctcgtcgcatcctgtgcccagcgcgagatcatgctcaaccatggcgtgctcgtcggtgagaagtggaatgatgaggccgcacggaaggtctatgagcaggcgggtggcaagccggcatacaccggttccactacggaaggcgcacagaatggcgagacggccatcagcttcgccgatccgaccaaagccgcgaaaaccggcggtgaggaataagctgaaatcagccgaacaatccaagccatagcactgacgaatcgtacggagcgaacatgagcaacgaatcatcgaatgcgatcaaagtgatcgcactgtctgcggcaagccttgcgctgctgtcggcatgcggcgaacccacggcgacaccgatggacgatgaatatgccggaaattccggcgaaagcgtgcaatcgcaggaagaaaattcgaagaacagcggtagcgccaccgactccggcgattctgcggattcggacgacaaaaaccatgccgacgatccgaacggcactacatccgacaagcaagacaccggcaactacgccgacggtacctactcgatcaacggccagtacgggccggtgggcgaagacaccatcgacgtgcatgtgacggtcaaagatcagaccgtcaccaatgtggaggttatcgggcatccgttcacgtccatctccaaaaagcaccagaatgcgttcgccgaagccatcaacggcgtggtggacggcaaaccgctcaaagacctcaaggtagacaaggtggccggtgccagctggacgtcggaagcgttcaacaaggcgttggacgtggcccgtcaggaagcgtcgatccagtaggtccagtagcggcgaaaagtctgcaaacgtacaatgagcgcctcagctacagcctcactcaaagagtgattaaaggccgtagcggggacgctcatgagtttcagatactactacgtgcaactctgctctgcaatgcctttcaggcggccataacgggccacagaacagccgtcatgttctcaggccaaggaatactcgcgtcgccatgcaacgccttacaggcgagcatggagccgagtatcgtgctgaacaggaattgcggatccaatccattacggaacactccggccttcatgccgcgctcaacaaactcagaaaaacgcttttccgcgggaacgagcacttgatccgcaatcgcattcaacgaaggattatcggaagaaagcaccacaccgacggctttcaaaccaagctcactgtcgaaaaaacagccctgaatgcgttgcagtatcgtcagcagaccgtttttcgacaactcgacatcgctgaaatccggcaatcccgcaacttccaactgaacgcggcgcaacagatcgtccgcattcttatagcgacggtaaatcgtggttttcgcaacaccggaacgacgggcgacctcttcaatggtcaccgcaccgacaccatcggaaatcacaatcgcaagcgtggccttcatgatcttatgatcggtttgctcgcgaagctgctcgcggcggctctgcgccttgcgaacggcctcatgcacgtcactgaccgcgtcggaaaccacatcggaaacggcttcggaaaccgcctcatgcactccggtaatcatgcgaccaccttggtgctttccaccttcgccacgtaccacctattgaatttgaccagcggaatacgcagcagcaagccaatcagcagcagcggaatcaggaacagcaacagcgaaccgatcgcatgccaataatcattgttgtaaataccggcaatggccgcacgcaatgccgtaatcgcatgcgtggccggcaggaacgggctgatatcgccgatgatcttcggcagcacggcaagcggatacgcgccgttcgcgccggaaatctgcaacaccagcgtcagcacgccaatggccttgcccacgttgccgaagctcgccaccatcgtgtaggtgaagaacgagaacacgagggaggccgcccagccggtcaacatgaacagccacgggtgcactgcctgaatgtgcaggaacagcaggccgccgcccagcgagaacgtgctctgcaacagtgcgatcacggcgaacacgccataatggccgaggaacagctgatgcggcttcggattgtcgagctcctcacgattcttgcgcgacaccgtggtcttgagtgttacggccataagcagcgatcccacgaacaacggcagaatcgtgtagaacggagccagttgcgagccgaaattctccacagggaacacagccgtgcgcttcacctggacgggagctgcaagagccgccgccagcgaatcggtgttgttgccgagcacttccttgacggtgttcatattgccgctgttcagcgcgtcggaaagcgtgccattgaacgaagacagcgcggtgctcgccttagtgaggctttcggcggtggaatcaagcaccgtgcgaatattggtcagctgcttgcctgccgacttcgtggtgctgttgagatctcccaacgcgcccttcagatcggtggccgtgctgctcagtgcggtggccgtgctgctgatcgaatcggaaatgtcgttgagctgcggcttgagctggctgtcgaaatcggttttgatgccgtcgatggaggccttcgcctgctgggcaagctggctcacgcgctcgcggtcggctgcggtgtcgctcactttcgcgtcgatattgtcggcgctggtgttgagtgagttcgctagatcgttgagttgcgtaatggtcgcgcccacgttggttttgagatgattgatggcgattttcgcgacttccggcaccagattgttgttgctgagctcgtcgagggcatcgtagatgttctgatagccttgcgcctgcttggatacgttcgcagcctgattgcgcagggcggtggccgtattgccggcttgggtgcccgcattgttgaatacgctgtcaatatcggtggagacagcgccgaagctgttcgacgagctgctcaacgcggtgctgagcgcattcgtgctggttttgacggctccggtcagatcgttgatgccgttcttcgactgtttgagctcgttgacggcgttcttcgcgctgccgctcacattggaaagcaggctgttggagctgtcgagcaggttctgcgcgctcaacgtcagcgagctgaacgtggtcaacgcggatgacgtgtcgttcagcgtgttcgcgaagttgttcatattgttgctgaagttggtgagcgtggcctgcgatttcggtttgtcaagctcatcggccagctgcgaggcgatgttgagcgcggtgctcgtcaacgttgcggagaacatttcgttgatctgtgctgccacggtgtcggctccctggccggtgatcttcggagcgagcgcgttcttcttctcgttgttgtagtaggtgagtgtggcatggtcgccgtccgcggtgaagaatgtcatcatgcgggtgctgaaatccttcggaatcaccactgctgcatagtatttgccggatttggtgccgtcgatggcctcttttttggtggtgaaggtccagtccatctggtcgttggcgcgcaaggtgttgaccacctgatcgccgatactgatcttcacgggaatgagatcggacttgtagccttcatcgtcgttggcgacggcgaatttcagattgccggtgttggcgaatggatcccagcttgcgctcacgttgaaccaggagaacaggccaggaattaccaccagtccgatgacgatgatgatggagacgatgttgctggtcaggcgtcgaacgtcgccgacgaacagtttccagatgtttttcatgcgttgctcctttcgctgttaccgttgggattggtgttgctcgctgtgccggtgttgccggtcgcgttcatggcctgtaccagtgttgcgatgccgtcggcatcggcttggctggtgtctgcgacgttggcaatcgcctgtttggtttcgtgttttcttcgttgtgccttgcgcatcagcttgtctcgcctgatttgttgcgcacgcttcttgcggcgcagccttgcagcttggcgttccaccagctgttcgcgaatcgcttcgtcgctgaggctgccgagttccacctggcgttgcaggctgaaacgcatatattcgatgaccatcaggaatccgatgatgagcagcacccagatgatccaggtggcaagcaccacgatcttctcgccgttggtgaaggagaagatcagcaccagaatcaccggcacaatgaaaccggcaaccagcgcgccacgcttgagcttcggatacagttcggcgaagcggctcgcacgttcctcgatcgcctcacggtagccgcccttatcggcgagcacttgaatggcctgggacacgttgtagccgcgttccggaagctgtacctcctcgccgatgatcatgtcgctttccttgatctgacgggcgaacaggcggttgagattgaccagcagcgggcgaatcgcaagtccgatgaagaacgcgaccacggcgaacatcagtagcgcgccaatcgacttgagccaatgcccgtcgtagaagccggcaatcgtctcacggaacgcgtcaatcgaataactgaatggtacgaacgggtagaccatgcggaagaatttcggcatcatctcaatcggatacaggccggaagcgcccggaatctgcacgatgatcagcgcgacgcacagtcccttgccaatatgcatgaacgaggtcgacagcgcgaaggtgatgctcagatataccagcgacgtgatgacgccggtaagtatgtacagcggcgcgttcaccgtctgcacgccgatgatgaggttgccgatggtggtgatcgcgccttggatggcgcccatgatgccgagcagcatgtagcgggcgaaatatttttcggaagtggtcaagtcgaggtcttcgaggccttcatcgtcgacctccaccttgaagatcaccacgaaggcgaacgcgcccacccacagggccaggttggtcatgagcggagccatgccggaaccgtaggagttcatcggatacacgtttttcgtgtcgatcaccgtgggggactgcatgaacgaggcgattttctccgtgttgagggagctgtcgccggtcaggcttttcagcatgtcgacgctgccgagcgctttcaggtcggtgctgacggtgatgagcttgttctccacctgctcgagctgcttgtcggtgttctgcagcgtggtgcgggtgtcgttcgccacctggtcgagttggtcgagcacggcggaggtctggttgaccacggtggtctggctggttacggtgccggacagtgtgccggcggtcatggcgagcgagctcagaccggagttgagctgggggagcgcaccggaattcaacgtgttgcgggcatctcccatgcttttcagcgaattttgcgtgctggtgttgaagtcggtggcgagtttggacacgctgtcggacgtggattgtgtgttctcgctcaacgttttgaggtcgttgagcgtgccagcggccgtgttgttggtgtcttcgagcttcttgatgatgtcttggtactgtgcgttgtcgctgacgttcttgagcttctcgatgagccgggcgttgctgtcggtcacgctttgcatgttgctgacggcctgctgtgcggtgccgcttgcggacgagacggccgtggtcaccttgttgatgctggtggtggtgtcgctggcggcctgcgaaatcaggccggaaccgttctccaaagcggtgttggcgttggacgtgaaggtattgaggccgttttgtgcggtgccgatggcggtggcggtgttcgccaggcccttgcccgcgcttgctgcggccagctgtacgtcgttcattgcctgacgggcggattgcgtttgttgcggcacgttggcgagctgtgcgtcaagatcttcgatggtggagcggatgaggcttacgttcttctgggttttgtcgagttctgctgtggtttcgttgacgaaggagttggttttgccgttgatggtgtcattcgcggagttcacggctttagtgagtacttcgctgacggtggagacgaaggtgttgttgacggtacgatcaacggtggtcgcgccttggtcggtgattttcggggagatcgggctcgatttttcgttgacatagtattccagcgtcggccggttcttgctgtcggtcacgacgttggcgagatcctcgctgaaatcggaggggatgatgatcgccgcatagcagtcgccggactgtaccgcttccatcgcttcggccttgcccatgaattcccagccaagctggtcgttgtctttcagcgtgtcttcgatctggtcgccgaggttcattttgccgagcagggcgttgtcggtgcctttgtcgacgttggccacggcaactttgatgccttgggtattgccatacggattccagaatccgtagatgttgaaccatgcgtacagcggcggaatgatggttataccgatcatgatgacccaggcggcaggtacggtgacgagtcgtttgaggtcacgacgcagaatctgcagtacgttgcgcattgtctccccagtccaatggatgttcgaccgtgttcgcgcgtagcgatacgttattcgtagcgctacgcctcccgtatcgtaatacccgctctcggacaaatttgggcacaggcgtaaatgcgctccgtccatgactgaaataaacacgacaaaccgcggcaggactgtgaatcttgctgttggagaccgcgcaacttgccttctgtgtctgcgcaagtcgagtctgctgtctgcgcatcttgtgattgcgggatgacatgtgacttgcgcaggcagaaatcgcaggttgtgcgcgttgcgcgcaaacaatcatctcgtgtagcgcactgcgatcgggttttggtagcgttgtgcagggaaggacgaacaagcatgagcaagattgaagatgtgagcgaggccgtcgccgacgaaaccgaaatcgcagcaatcgaagaggccggcatcattgcgcaatcgcaatcggcggaagatgacggcaatcctgctgaccgcaggctgccgctgattgcacgtatttacggcatcgtcatgttgatcgaaggcgtggtgatgttgccgatcatcgtgatttcctgcctgtatgcagtccacgccgcgctttccggcaaactggcgtttggcgcgctgaatctcaccactattctgtcggttattcatgctgcagtgctgctggtctccaccgcatgccttgcgattttcggcatgctgctgattctcaacaagcgtcggcatatcgcgcaatggacgtatctgatgattccgctcacgcttgcggaaggcctattgtcgttgtcgttgcagggtttgggtgtgaatctgatcagtccaaccgtgcagctgcttgtattggttgcgttgcatatcacggctgatccgtcgctgcgcgaggagcgacgtttgcagttcgcgcttcgtcgtttggatgcgcgcagcgagtatgagacggctgtttcgaagggtatggccggccgtgatctgaccggcaagggctatatttcgcttgatttcttcaacctgttttggctgtttgtggtcggatgcgtgttcggtctggtagtggagacgctataccactatgtgctgttcggcgaatggcaggatcgcgccggatttttgtgggggccgttctcgccgatctacggctttggcgcggtgatcctgacggtattgctcaaccacttgtggcggtcgaattggatgctgatcttctgcgccagcgcggtgattggcggcgcgttcgaatattttaccagctggttcatggaggttgcgttcggtattcgcgcgtgggattacacgggtcaatggctgtcgattgatgggcgcacatccggcaaatacatgtttttctggggaatactcggcttggtgtgggtgaagctgattctgccgcatttgcttgcgatgattcagcgtattccgtggaagatccgctatacgttgacggcggtgtgtttcgcgctgattttcgttgacggcgtgatgacgttgatggcgctggattcctggtattcgcgtatggcgggtattgcgcaggattcgcccgtttcgcaattcttcgccacgtatttcgacgacgacttcatggccaatcggttccagaccatgacgctcgacccgtccacggccagccgcatgtagtgtctgactgctttatggatgactgctttatgggctagatggcgaagctttgtggaagaacgtgtatggtgcgtccgctattggttgcgccgtgcgcggctgcatgtgacctgtgcccgcacggcctttgtggacacggtacgctgcgacttctgcgcgcttaggcggcgaagctttgtgcgagctggcggatcagatccggcctatgtccactccatgaggagttcggtgagatgacgaccggaatctgcttgaaaccagcgtttttgatctgttcgaaggtggacgggttcttcgtcaggtcaacggtgtcgtaacgcacgcccagctttgcaagctcttgttcggtggcttcgcattgcgggttgctcggattggtgaagacggtcacggtcattcgatttcctccctatgcaaaaatggcttccgtcgtttgcgaaagccgtgtcggccacgttcttcggttatgctcgcttacgcaagccactatctagcatacacactaccggtagtggtgtgtcgtgagtttcctcactgtatatagtggggaattccccagaattccccaaaatacgaacgtttgttcgaatatgtctagtgtaccccaaaccacggaattcgcgtccaagcgcatgtcgtgcgtgttttatggagagggttgtatatagggggatggcttggtgacgtcaatgcctgcctgatggcacggcgaaaactgtttattcatatgtaaaacgccggtaatataccgcaaatgacctcagttgtcccccccccccttaaaatgataagtatgcgtagcgcgaatttgcgtgggcgtgttgaacaaccttgatgattccgatttgcctactgtcttaaggactgttgggctgacaggaaattctgagggggctgtgagcatattcgcgggaatttgctctacggtatgctgaggttcggcggttttccgctgaatacaggaaacccctggaaatcgtacgattcccaggggtggatggttggtcgctggctagggcagcgcatcagggtgaagaagtgttttcgaaggctcttcctcacctatcaactgcgtttgaggtatagccctcgccggcagccagccaagtcttatcttatacacccttagctatgtcggcgaccttattgcagggtgtgttcaataaagccataacgtgccattaaatacggcaatttggctccgcgcaagtactccagaggaagtcgttgcacggagccaaattaatcgctttcaggcgaatgccaccttgactgagttagactcaggcgcgcttgcggagcacggtgatgccggcgaagccgagcagggcgatcacggcgaacaccgcaacgccaccaacggtagcgccggtgttgccgagaacggccttcttggtgttgcccttggtgtcattcttcttggtggtgtcggccggcttgctgtcatccttcttggagtcgtcggtcggagcgtccttgtacatggcgtacactgcccagtcgccggtcacgaccatgtctggatcgaccggaacgttgccgtcgttggaggcgaagccccatccggtgaaggtcttgccctcgacggccggtgcctggatgcctgcggcgtaggtggagaacttgacgtggtccttggcgtagtagccgacggtctggatcagctcgttcttggtgttgtagaaggagaccgtgttcagagtcttatcttccgaagtcggagtgtccttgtacatcgggtagacggcccagttgccggtcacttctgcgttcgggtcgactgcgacgttgccgtcgttggaggcgaagccccatccggtgaaggtcttgccctcgacggccggtgcctggatgcctgcggcgtaggtggagaacttgacgtggtccttggcgtagtagccgacggtctggatgagctggtcggcgcctgcgtagaaggagacggtgtactgggtgttgtcatcctgtgtcggggtatccgcgtacgtcgcgtatacggcgatgtccgcgaacacctgatcggtgtccttgagcatggtgccctcggagtaagcccagccggtgaaggtcttgccctcgatggtcggtgcctggatgccgagtgcgtactgggagaaggcggtgcctttctgccaggtgactccctggatgctgtgtccgtcagcggtgtagaacgtcaccgtggcgtattcttctttagcctgcgaggaagttgcagaattctgattctgggcagtatcagccattgctactgccggtgccaaggcggccagagtcgctacagctgcaacgcccgcaataatctttttgccaaaagacatttggggaaaccctttcttagttacgtaactagttgccccaaagcgatgccttcgaaataccgccctgaatgcgtggagttccccctcataagaattccgaaggaccatgatagctgccccctagcgactttttaagagtctagggcgtgttcgttggaattgcaatcttttctcgatttcccactttccgattgtggctggtcgaagggattcctttcgggattggcaggggccatatccgggatgtcatgtctgtgatgggggcgtcgtccggtgttcgggaagcggcaggccatgtatggttcgggaacggcaggtcacgtagtgctcggagacaaatacaccacaccatacagcgtggcaagcgtcccattccctccactcgctggattttttgcccgctaaaaggtccgtcaccgggatgattcctccaccggctggaggaatcgggacgttgataggcctaccaacgggttgattcctccactcactggagtttttcggacgctgagaggtcgatttgcgtcccgtttcctccagtgactgggagttttatcccgctggaagactggtttacgggaagattgttccactgactggggtttggacgttgggcgtctgccagtgggaggattcttccagtgggtggaggttttgtctcgctggaaggcgcgttcgccgatagtatggcagggtgtttaccggcgcggatgatgatgtgacgatccgtgtttggggcgcgaacaatgtgaatgcggacactccgagcagcgcgcttgacgcatactgtgcgaaacatgacgtcagttacaaaagtttgggcgaaaacagttttgtgactacttgggaggaaaacggcaccattgtgtacgtgcgcgagctggtaagcgacagcgtggtgcacgcggtatggatcgagtatccgtcgtccacgtcagatcggggcaatgcgattgtggaacaggtggttcccacgcgtaaggcgctcggctgaatggacatatgtgctctggatttcgggctttgagccgtgggtgcaattgtgggctatgaggattgcttgagcgtcttggatcgtgcgggtcgcttggtctgcaagctgtgggatgcgagtcgtgctgcggtgagtatgactaattgcgtctggagccaaaaatcgcgggaatcgaaaaacccctggaagctaatgtttccaagggtttcgcggtgcccaccgtgggattcgaacccacaacccacgacttaattaagcgtcctctagatccggaatcggaaggccggcagaaacccacggcatatgaacgccattcgtattcgagctgcgggtgtggcgatgaagtggaaaagacgagggaacgcccacgtgtcgccgccgatcgcaccaactgcatcgtatctttccttgtaccgcgttacctcatgctgatggtcgtgggagccgcggcgaggaaacgctgagaaccacgccggacatacgcgccggccattcattggccggctttttgtttacaaggaagtaaaaatggaattctcggatcatagacaaccgccccgtgaatggacaccctggctcgacgaatgggtgggcgcgatgcgcgcgcagggcaattcacccagaaccatcgagaactggtagtacgtcgtggggcacctcgcgctcaagacgcgaaaaagccccgaggacatcacaggcaaggacatcatcgactggctgaaccggggcgtgggcgccaactccaaacgctccgacgtcaacgcatgcaccgcgtttttcggttgggcatgcaggacggggcggagaaaagacaatccaatggatctcgtgccgaccgtccaccgagacaggcgcaagcagatacccgcccccgtcgaggccgtggagaaggccaaacattgcgcggacaagagggcgctgctgaccatcatgctcatggacgaggcgggactacgcagatccgagctcgccgcgatgcatacgcgcgacgtcatcgacgatctgacgggcaaaagcatcatcgtccacggcaagggaggcaaggaccgcatcatcccgttgagcgaccagctcgggcggatcgtgtcctccctgccggaaggatacttcttccccggcgaacatgacggccacgtatgtcacgacaccatctaccggatcgtgaagaacgcgaccggatggccgccgcacgcgttccgccgcaagttcgccaccgacctgtggagggcgaccgacgacgccatgaaggtcaaggagatgctgggacacgagtcgctgcagaccacgcaggactacatctacgcgaccttggacgacctgcgcgacgcggtggacgagctccgcgcgtaccggggaacggacgcacgggaaattcaccccgaaaagatactcgaagcgtacaacgtccctcccgccatcacgagactgctgctcgacagcatccgcaaccaggaatgaagcacgccgtccctctggtccaccggaccagagacgggaactcgtggtcttccccgtgaatcccattcggtcggctcgttgtcgcgatttccggggtatatcccgtgtggagcatgtcagtgtgcggcgctgcggcgggacacgcgatgcccggtatgggtggaatgctcctgattttttgcgggaacggcgttcatcggcctccccggcgctgggcggccaatgccgtatggtttgtcggcaagagacatgacaggctcttacacgacattacaccgggatattgcatagatctatcaattacccgctacaacatattaggttttctctggctccggttgtttggcgtcgggtgcatggttagtatggattggctacaatgtattagacagtccgatgagggacgaatgacatgagattggaggccgacgatggccgacccgaagcatccccgccactacgacgaggcgttcaaacggcagatcgcgcagctttacgagaacggcaagccggcgcgcgagatcaaggacaagtacgacatctcgcattccacgctgcaccgttgggtccagggcatccgcaacagcggctccacgaaagccgccgacaaccgcacccctgagcagaacgagccggtcgagctgcgcaagcgcaacagacagttggagatggaggtggacgttttaaaacaagcggcgctgatattcgcacgaaagtagcagtgatacgggccaacgcctcccgttatccgatatcggcgcaatgcaggatactgggcgttccccgctccgcctactactggatgatcgaacatcccgaagccgagcgggtggacccgatcgccggcgacgtgcacgcgatctggcgcgacagccatgagcgttacggcgccaggaagatcaaggccgcgctggagcggaggggcgtcaccgcctccagaaggcgcatcgtcaacatcatgaaacggcggggcatgacgagcgcgtacgcgcgcagaacgttcaaaccacacaagacgcgggtcaacgaggccaggctcgcgaacatcctcgaccgcgagttcgacggctacgagccgcgcacccacctggccagtgacctgacgtacgtgcgcgtcggcggcaagtgggcgtacgtgtgcctgctcatcgacctggcgaacaggagcatcgccggccacagcgccgacacgagccgcaccgccgacctggtcatggccgcgttcgccacgctcgacttccctctgaccgaggtggaggtgttccacacggagcggggcagcgagttcgacaacgcgaaaatcgacgagctgctcgacgtgttcgacatcagaagatcgctgtcaaggaagggcaacccgtacgacaacgccgtggtcgaatccaccaacaggctcctgaagaaggagctcatataccggaaccactacaccagcctggaacaactacgctccgacctcaacgactatgtgtggtggttcaacaaccaaagactccactccaccctcggataccggagccccaacgaattcacacaacaaggactcgtcctctaaagaattgtccaacacgccgttgccaatccagacccacggggacaccagggccggacgcgtgacgacccatcccgaccggtgatatataaccccggaacaggcggaatcacatgcgatatgttcttctggggtgtgctcggcctggcatgggtcaagctgatgctgccgtggctgctgcgcctgatccaacgcattccatggaagatccgccattcgctgaccgccgtgtgcctggcgctgatgctcgtcgacgcggcgatgacgctgatggcgctggacgcgtggtattcgcgcatggcgggcatcgagccggattcgccggtgatgtcgttcttcaacacatatttcaacgatgatttcatggcggaacgtttccagacgatgtcgctggatccgggcaaggccggccgcctgtgacgccggggacggccgcggtgggtgttaggaaaccgttaacaatccgtccgcgggcgtatgggttccgttagattcggagcatgacttcgctcagggccatatcatcaagatgtttattggaaatcggtccggccgcgcccgcgaacgcggcggcggccggaccgtgcatctgatgattggagaagagcaacatgctttggtgggttgatgccgcctatgtcgtgggcgtagtggcgctgttcatcgtcttcgacctgatcgcgaaggcggtggatcgtctatgatggctgttttctgcgccatcggcgtcgtattgggaatcgccggtgtggtgtatatggggatcgccctgtgccgcccggagcggttctgagggccggggaagagtcttaaggttccgaaatggtatatctctatgcttttatggcgttcggtttgatcgccttgatcctggcggtcatataccggccgctgggcgattacatgtatcgcgtgtacacgaccgataaggatctgttcttcgaaaagtggatctaccgcatcatcggcgtggattcctcgaagggacagtcctggaaggcgtatttccgcggagtgcttggcttctccgtgatgagcctgctggtcctgtacctgctgcagcgcgtgcagtcctggctgccgttctcgctgggcttcgacaacgtgccggctccgctggcgttcaacacggccgcatccttcgtgacgaacacgaactggcagtcctattcgcctgaccagacattgggctattccgtccagatcgcaggcctgtgcgtgcagaacttcgtttccgccgcggtcggcatcgccgtatccatcgccctggtgcgaggcttcatgctgcgccgctccgacacgatcggcaatttctgggtggacctcatccgtggcacgttccgcatcctcatgcccctgaccatcgtgatgggcactatcctcatcgcgctgggcgtcgcacagaacttctcgggcttcaccaccgtcgccaccgtggctggcggcgaacagaccatcatgggcggcccggtggcctcccaggaggtcatcaaggaactgggcaccaacggcggcggtttcttcaacgccaattcgtcccatccgtacgagaacccgaacatgtggaccaacctcattgagatcctgctgatgctggccatccccgtcgcgctgacccgcacgttcggccgcatgatcggcaacatccgtcagggctatgcgctgctcggcgccatggtcgtcctgttcggcatctccttcttcgccgtcgtgagcttcgaatccttcgtggacgatccgctcacctccctcaccggaggctccatggaaggcaaggaggatcgcttcggcatcgtctggtccgcgctgttcggcaccacgtccacaagcacgtccaccggcgcggtcaactccatgcatgattcctacaccgcgctcggaggcatgatgtacatgttcaacatgatgctgggcgaagtctccccgggcggcgtcggcgcagggctgtacggcatcctcgtcatggccgtcgtggccgtgttcatcgcaggcctcatggtcggccgcacgccggaatacctcggcaagaagatcggccctcgcgagatgaagatggcctcgctgtacttcctcgtcatgccggtcaccgtggtgctgttcgtggctctgagcttcgccatcccgggcatccgcgaagacacgttcgcggccctgaacaacagcggaaaccatggtctgtctgaagtggtctacgcgttcgtgtccggcgccaacaacaacggctccgcattcgcgggcctgtccgccgacaccccgtggttcgacacgatgatcggtctggccatgctcatcggacggttcctgccgatcatgctggtgctaagcctggccggctcgctggccaagcaggatgtcgtgccggagaccgccggcacgatgaagaccgacaacaagttgttcgttggcctgctcgttttcgtcattttcattatttccgcgctgacgttcttcccgacgcttgctctgggaccgttggcagaaggtttggtggcataacatgtcttccgcgaccgcaaacgacgtcatcaacgacgtgcgtaccagcaacaacgcatcgttgccggcgatgctgggcaagagtctgccggcggcgttcaggaaattcagtcccgccaagatgcggcacaaccccgtcatgttcgtggtatgggtgggcgccgcattcctgacgctcctcggagtgttccagctgttcattccggaactgcgcgcgggcgagccggtgtatttcacctggatcatcgccgtgtgcctgtgggccacggtgctgttcgcgaacctcgccgaagccgtcgctgaagggcgcggcaaggcccaggccgacgcgctgcgcaagacccgcaccaccacgccggcccacctggtccacggatacgatgaaaaaggcgatcctgacgcacgctcgttgtccgtcgccatcatcgaagtcccgtcctccgacctcaaactcggcgacgtggtcgtcgtcgaagccggacagcttatccccggcgacggcgacatcatctccggcatcgcctccgtggatgaatccgccatcaccggcgaatccgccccggtcatccgcgaatccggcggcgaccgctccgcggtgaccggcggcacccgcgtgctgtccgaccgcatcgtcgtgcgcatcacccagaagccgggcgaatccttcgtcgacaagatgatcgcgctggtcgaaggcgcgaaccgtcagaagaccccgaacgaaatcgccctcgacgtgctgctgagctcgctgaccatcatcttcctgatcgtcgtgatgtgcctcaacccgcaggccggcgcggtcggcacctccgtcagcctcaccgtgctggtggcgctgctcgtctgcctgatcccgacgaccatcggcgcgctgctgagcgccatcggcatcgccggcatggaccgtctggtccagcgcaacgtgctcgccacgtcgggccgtgccatcgaagcggccggcgacgtgaccgcgctgctgctcgacaagaccggcaccatcacgtacggcaaccgtcaggcatccgaattccacgcgctgccgggcatcgaccatgacgacatggtccgcgccgcggcgctgagctccctggctgactctacgccggaaggccagtcgatcatcgccctggccgaacgcgaaggccatcacttcgacatgatgccgggggcggaagcggtggaattcaccgccgagacccgcatgtccggcctggatctgcccaacggcgaccgcatccgcaagggtgccacctccgcggtggaagcctggatcgaacgcgaaggcggcgtcatgagcatcgaagtgcgcgacgctctgcacgaccgtgtcgacaccatctccgcacaaggcggtaccccgttggtcgtggccgaacagctgtccaccggcgaagtcaaggtgctgggcgtcgttcagctcaaggatgtcgtcaaggaaggcctgcgcgaacgcttcgccgacctgcgcaagatgggcatccgcaccgtcatggtcacgggcgacaacccgctgaccgcgaaggccattgcagaagaggccggcgtcgacgatttcatcgccgaagccaagccggaagacaagctcgcctacatcaaggccgaacaggccaagggacagctggtcgccatgaccggcgacggcacgaacgacgcccccgccctggcccagtccgatgtcggcgtcgccatgaactccggcaccgccgcggcgaaggaagccggcaacatggtcgacctcgactccgacccgaccaagctgatcgacatcgtccgcatcggcaagcagctgctcatcacccgcggcgcgctgaccaccttctccatcgccaacgacatcgcgaagtacttcgcgatcatcccggccatgttcatggacaagttccccggtcttgccacgctgaacatcatgggactgcacagtccgttgtccgcggtgctgtccgccattatcttcaacgccatcatcatcgtgatcctgatcccgctggccctcaagggcgtgcggtaccgcgccgagtccagcgacaagatcctgtccaggaacctgtccgtgtacggtctgggcggcgtggtcgccccgttcgtcggcatctggatcatcgacctgttcgtgcgtctgattccgggattctaaggaaattaggtaagggaaacgattatgaaatctgcattgtcgttgaatctgcgcagctactgggccggactgaaggccgtgctggtctgcacgctcgccgtgatcgtatacacggcgttgatgaccggcatcggcgctctgggattccccgagcaggccaacggctcgatgatcacgaactccgaaggtcagattgtcggatcgtccctgatcggacagtccttctccgatgccgacagcgaagccatcgacaagtatttccagctccgtccgtccgcagccggcgacggatacgacgcggcggcgtccagcggtgccaacaagggacattccgatgaggaatatctcaagaccatcgaagagcgccgcgacgccatcgccgaacgcgaaggcgtggacgtgaagcaggtccccgccgacgcggcgaccgcctcctcctccggactggacccgcacatcagtcccgaatatgcggccatccaggttgagcgtgtggccgaagcccgtggcatggacgtcgaagatgtcgaacggctcgtcaaggagcacaccaccggccgtggtctgggcttcatcggagagcctgtggtcaacgtcgtcaccctgaatctggcgttggacgacatggagtgaatccgactctgaggcgcatcggatacggtgcgcctcggatgtcatcaggccaaaaactgggataatccgtagatgaaggacatcccggacggatgcggcatcgtcgtgcgcggcggtgccgcatccgtccggcttgaggccacggaacgtatgacatgcggcggaacttcgaaatggagggaatatggcggtgacgaagcggggtgcgctgagggttctgctcggtgcggcgcccggcgtgggcaaaacatatgcgatgctgtccgaaggcagacggctggtcgaggagggcaaggacgtcgtcatcgccctgttggagacccatggccgcaaagccacgcagaacgccgccaaaggcctggagacggtgcctcggcgctgcatgaaataccgtggcatgtggttcaatgaaatggatctgttcgccgtcatcgcgcgccgcccgcaggtcgccctcgtcgacgagctggcccatacgaacattcccggatgcacgcacgaaaaacgctggcaggacgtggtcgacctgctggacgccggcatcgacgtcatcaccaccatcaacgtgcagcatatcgaatcgctgaacgacgtcgtgcggtccatcacgaacagcgaacagcgtgaaaccgttcccgacaaggtgctgcgttccgcagacagcatcgaactgatcgatctgcccccgaagaacctgcgcgaacgtctttccgccggcctcatctattcggcggaccgcgtggacgccgcattgagcaactatttccgtgtgggaaacctgaccgcattgcgcgagctggcgttgctctggctggcgggcaacgtcgacgaagcgttgcaggaataccgcaacgaacaccacatcaacgcgaaatgggagacccgcgaacgcgtcgtcgtcgcgctgtcgggcggtcctgaaggcgaacagctcctgcggcgcggcgcaagggtcgccagggcgtccggcggcggcgatctgatcgcggtgcacgtcacggccgaggacgggctgcacggatccagcccggggctgctggtgcagcagcgcgaactcgtcgaaaaactgggcggcacataccatcagatcgtcggcgaagacatctccgacgcactgatctccttcgcccgcgccaacaacgcgacgcagatcatcgtgggcgtctctcgacgcccgcccctcgcccggtggctgggccggccgtcgtcggcgaacggcatcatcgcgaattcgggcgacatcgacgtgcacgtcgtcacccacacgttcgcggcgaaaggcatgcgcctgccgcgcatgaaacgcaccatgacgatgcgccggcgcatcgcaggctgcatattctcattgctgtcggtgccgtttctgggctggctgctcatgcaatacagcggcgtggatgcgttgtcccgcgattccctgttcttccagctgctcgtcgtcatcgccgcgctgatcggcggcgtctcgtcggccactttgtgcgcgttgctgagcggtctggtgctcgactacgtctacatccagccggtgggctcactgcaaatgctcagggcgcaggacgtgatgaccatcgtgctgtacatcctcataggcatcatcgtgtcctgcgtcgtcgaccgggccgacgagaaggcgcggcaggcccaacgtgcgaccgcggaatcggaagtgctcgccagcgtgtccgacgctgtgctgcgcagctccaatccgttgcaggcgattctcgaccgcacccgcgaggcgttcggcttcacctgcgtgcgcctcacccatgacggcgtcgatgtcgcggtcagcggcgtatgccccaccggggaggagccggacgtcatcgaccttgacgcggtcatcacgccgccgtccgacggcgccgatcagaacggcgaatcccatgacgggcagacctccgcctcacgtgatgccgcatcctccggaacgccgcggaaaacagagccgattcgccttgaactgtacggcagcgaaatcgacgcggccgaccagcggttgctgcaggccatcgtctcccaggtgcagaccgtgctggaacacgacgtgctgcagcgcaaggccgacgaagtcaagccgctggccgccgcggagaagctgcgcacggccctgctcaacgcggtcagccatgacctgcgccgtccgctggcctccgccacggctgcggtgtccggcctgaaacaggtcggcgacgcccttggccccgaaggccggcgcgaactgctcgacgtcgccgacgtcggcctgcacgatctgacacgactggtcaccgacctgctcgacgtgtcccgtctgcacgaacgtgcgatgccgatatcgctggtggcggccgacgtcgcggaagccgtgatgcagacgctggacgagctgcatgccggtccgaatgccatcaacctcgacctgcccgtggacctgccgctggcggtcgccgacccgccgctgctgcgtcgtgcgatacacaatgtgctcgccaacgcgcaacgctacaatccgccggaccatcgcatccgcatcgcggtctccacattccgttccgtcgtgcagatccgcgtcgtggactacggcccgggcgtgcccgacgaccgcaaggacgagctgttcgcgccgttccaccgtctgggcgacacggacaacaccacgggccttggcttgggaatggcgctgtcgaaaggcttcatcgaatcgatgggcggcgccatcgacgcggaggacactccgggcggcggcctgaccatggtgatcatgctgcgcgcggcggacgagcgctatgcgatcggggaaccgttgtccgaagaggacgcgcgcgcctgcgccaccgcattggactcggacatgtgggacgtgaccgccgccgtcagcggcgtgatgctgcccctgagcgtggacgaatcacgtgacggcgaattggggcgtttcgccgacgccgaatccgataccgcggtcgccggtgacacggccgctgcggacgagcataccgacgttgccgacgtgacggctgctgagaagggagaatagacgcatgaaaatcctgattgccgatgatgacccgcagttcctgaaggcgttgcgtatcacgctgcgctcgcagggctacgagatcgtgactgcatcggatggcgtgcagtgcatttcggcggcggtggagcatcatcccgatctgatggtgttggatctgggcatgccgaaaatggacggcatgggcgtgatccagggcgtgcgcggctggacggacgcgcccatcctggtggtgtcggggcgtaccgatgcacgcgagaaggttgcggccttggatgccggcgccgacgattatgtgaccaaaccggtgtcgatcgacgaactgctggcgcgtatccgtgcgctgacccgccgtatcctgcaggagacggagacgccgatagtctcgttcgggaacgtgaccgttgacctgtccgcgcatgccgtgttccgcgtgtaccacgggcggaaggtgcgtgtgcgcctgacgccgacggagtggaaggttctggagatcctggtgcgcaacgccggacggctcgtgacccgtaaggatctgctgaccggcatttggggcgcggagcatgtgaacgactccggctatctgcggttgtatgtctcgcagctgcgcaagaagatagaggacgacccgtcgcatccgaagtatctgaagacggagcagggcatgggataccgcctggacctgccgtctgcgggcggcggcgaatagaggccggggacgggtgaaggcgggtggaggctgggcgggcggcgtctgtccgcccagcctcgcgttatgcgtcgtatgggaggaatcatcgaggttgcggaaagcggagaggaaaacagccgataaacctgcgccacacgtcgtatgggaggaatcatcgaggggctgggcggccggttttgcccgctttgtttgccggtcccgcccgcttcaatcggggagaccgctggacacgatgcgtcgaaatggctttcaggctgcgagattctgcgcgagctgacggatcttgtccggctggtggccgctccatgatgcgttcggggagatgacgacaggaatctgcttgaatcccgcgtccttgatctgttcgaaggtggacgggttctgcgtcaggtcgacggcgacatatcgcacgcccaaacgggtgagctcctgttcggtggcttcgcactgtggattgctgggattcatgaagaccgtgaccgtcatcgggcatcctccttaaagcgcgtagtcgatatgcggttgtcggccggcgtggacgtaaaatccgctccctctagcgcacccactgtttgtagtggtgtgtcgtggggctattcactagatgtagtgttcgacacgcctcgaattcaagtcattcgaacatatgttcgaccattttagcacctttgcggaccgtccggatgtgacctaaaccacatccttcgtctcacctgtcggtcggtcttctcctcttgctcactctcctgacgcttttgaccgcagattccggcgtgttgcggtcaaaaccgtcaagatgtaatgcgcactgcagcggttggcggagtatggggtcggtgggttcgatccagcgggtgcaactcggcgggtgtggggctgccaaggtgtggggttgacaggatgtgggactggcgcgtcggcaggtgtgggaccgaaccgccggcaggcgtgtgccagagtatgacaaaagcccgaaaaccattgtggcaaacggctttcgggctttcaggcggtgccccccgtgggattcgaacccacaacccacgacttaaaaggacgctgctctaaccgttgagctagaggggcaacagagagacagtatacagcatatttacgcaaaacgccacacaaatcagttgtaagtaacgaaaaacgtggattatcaccaagtcattgccgaatcatcatcgaattcccgcgaatcgcaatatcatttctgcatatctgctcgtacagtggaacgcatgtcatgtaccacgattcttgtaggcaagaaagccagctacgacggctccaccatcatcgcacgcgacgatgattccggttccggacgttacgatcccaagaaattcattgcggtagcaccgcaagaccagccgagacattaccgcagtgtgctcagtcatgtcgaaattgaccttccagacaatccatgccgatacagcattgtgccgaacgtgctgccgaatcgcggaattctcgcggaagcgggcgtcaacgagcacaatgtggcgatgagcgccactgaaaccatcgcagtcaacgagcgcgtgctagccgctgatccgctcgttgaactgcaaccggcgaacgaagccgctgatacccctgaaattccgggcggaatcggagaggaagacatcatcacccttgtgctgccttacgtaaccacggcgcgcgaaggcgtcgcacgtctcgccgaactgcttgaaacatacggcacctacgaatcgaacggcatcatcatttccgacgtaaacgaaatctggtacgtcgaaacaatcggcgggcaccattggatcgcccgccgcgtgccggacgactgctatgcgaccatccccaaccagctcggcatcgacgatttcgacttcgacgacgccttcaacgcccaacgcgaattcatgtgcagtgccgatctgcgcgaattcatggacgcgcaccaccttgaccgcactatgagcgcggcagcaagtggcggcttcggattccagtcgacgagcgctttcggaaacggcggcatgaacggtggcggcaatagcagtagcggcgcggcgctgggccacaaccatttcaatccgcgcacagccttcggtaccgccaccaccaaagaccatatctacaacacgccgcgcgcctggtacatgcagcgctacctcaatccaagcgaggattgggattcgccggccgcccgttacacgcccgcgtccgacgatattccgtggtgtcgtgtgcctgagaacgctgtgacgctcgaagacgtcgacttcctgatgagtgcacacttcgaggggaccccttacgatccgtacggtacgctcgggacgccggaaagccgccatcgctaccgtccgatcggcatcaaccgcaccgggcatatggtggccatgcagattcgtccgtacgcgccggaggcaagccgttcgatcatgtggatctcatacggttccggccccttcaccgcggccacgccgttctacgcgaacgtcgacgatacgcccgcctacctgcgtgacaccacgccggaagtctcgaccggcaacctgtactgggcgaaccgtttgatcgccgcgctcgccgacgcgcatttctacgaaaccagcaatgcgatcgaaggatttgcggaatcggcccgcgcttacggccatcgtctggtggaatgtactgatgccgaattgcgtgagatgtccgcgcaaacgagcgcgtccgaatcgcaggagcgtgcaggggccgcggagattacggaaaacgcaagtattgcaattatcgcaaaactgcagcagtccaacgaagaaatggcggaatatttgcgcactcacgttacgaaactgctcaacgacgtgctctacacgtccagtaatctcatgcacaacagtttcgccatgtccgaccgctggaactaagcataaagccccgaaatccggcaaaacccgtcccaatgagccaaggtttccgcgctcggagcattccgcatgaacgcaggctgttggaagcgtcagtactgctcccgacagcctcacggctgcatccgcatcctcgtacgtcagtttttgcccatatctcgcttatatatggcagatttcgagagctgacacgaggcatttcgcttatatatatatatggcactcgtgcttgtaggcaaggcgatttcgggggtaaatataccctctaagtcaccttgctatcaagggcatctgccatatataaggcagatagtgctatctagaccgtcgattgaccatcaaatcgtcggaaatcgcgatcagttgaacccgacgacgtgttccgccacgaaataccccttgcgaatcacgaaacgaccgatcgacccgcgcaaattcaacgcacgagacatggccttcttgcgcacatccttgtaaatagtgggggagtacgccttaatgtcgtcccacatatcctttttcttctcataattttccggatcgcgagacaaaatcatgaacacacttgccacggaactttcaatcgccaggaagtggatcatataacggtacaggccgtccggcaccgtgccgcgttccggagttgcacgcaccatgcactggttgacgaggcgcagctggtcgacgcggcggatcatcacatcggtctgcacgctctgcccgtcgcgcccgatgaaatagtggtagaacggcgtatccaaatacttcatggtcttcacccacgggaacggttggtacgcgtaaatgaagtccacgtagaacgtgtgctccggcagctgcatgccggactctcgcaccacggcggtgcggtacgtcagcgcgtgcatgagaatgtattcagccaagccgaaatgcccaagatcgttccaggtcaggcgctcgccggccttcatggcatggcggaagttcaccacatgcttgttgcgtttgccaaccttgtcatacacataattagtgacgagcatgtcgatcggctcggtggaatcggcctcttcgcgcagcacggccatgacctgttcgagcgattcggggccaacccaatcgtcggcgtcaacaaccttcacgtacatgccgcttgccgccgcgatgccggtgttgacggctccgccatgccccttgttctcttggtggatggcgcgcacgatgcctggatagcgggcttcgaatttctgtgccatttccagcgtgccgtcggacgagccgtcatccacgatcagcacttcgatgtcgtcgttgcgcttcgctgcgattaacgacatgacgcatcgttccaaatattcggtcatgttgtacgcgggcaccacgaaggtgagcgtcttcttctcctgcatagtcttccttggtaggacgaggtgaccttccgcgcgcggcgcgtggtcactgcgtaacgaaactaacgtagcaccttgtttgcttcagaggaacggtttgtatgcaataggcaccctgaatagcgcaatctgcacctgaaatttcccttaagggtaccgttgttgacaatttgtaagttttcgtcgatgcttgttggcttgtgcgatgcttgcgattcccctgttgctggtactgttcgattcttgtgtctggcgcctgttggcgttggctgcgatgcttgcgatgactgggggcggctgggttttacgactgctgttcggcttgcgtgccttggcttccggctgcgccttgttcggtattctgttcagcgttctgctcggctgggctttccgtattgttttgtgattgtgcctcttttgcggccttgcgctcgcgttttgcgatttccttgatttcgcgcctttcctgcttttccgcctcttttgtggctttgtcgctttcgaaacgcagttccggcttggcttccatgcggctcaagccatgccaggccagattcacgatgtgcgcggcaatctgctctttactgagtttgcgctggtccgcccaatactggcaggtatatacggtcatgccgatgagcatctgcgcgtagtatggcacgcccttggtcggcaggtgctggcgtttgaacgcttcggcgagaatgtcttccacgcgcagggcgatgtctcccaaaagcgaattgaacgagctggccggatcggttttcggcgaatcgcgggtgagcactcggaatccttcagcattctcctcaacataggtgagcagtgccagcgccgtgcgttccacgatttgacgggggtgcgcttgtgggtcggagagcgcgttgacgagcgtgtcggtaagcgcgcgcatctcacggtccaccaccacagcgtacaggccctctttgcctccgaaatgctcgtacacaatgggtttcgacactttcgcggtggcggcgatctcctccacgctcactgcttcgaaccccttcgacgcgaacagcgaacgaccgatttcgatgagctgctcgcgccgctgatacgacgtcattctggatgtattggccatgccgtccagtttttcatgccccgtggatagtctgtccgattctggtgaatcgtacacttgggctcggtatttggacggttcgttgtccgattctgcagaatcggacattcgtggtgcgtccgcggggcggagccggtgtgtccgttgcgctttttaggctggagtcatggatacgaatgtgattattgcgattgtcgccgttgtcgttatcgcggcaattctggtgattggcggttggtggctcggtaagacccgcaagaacgccgtcgataagtccacggaggatgcgaaagccaaggctgacgcccgtcttgccgcggaagcaaagtcggctgcggctgattcttccacggtgaagccgtccgttgattccaatgttgatgcagctgaaaaagctccggctgaaagtcagcagaagtcctcagctcaagcttcctcttccgaaacggcagctcctgcaccagccaccgaagccaagcccgaaccggttcatgaaacccccgaatccgccggcacgcgcatgcagcgtcttaaggcgcgcctgtcgaaatccggcaatccgttcggcaaggctctgttcaacattcttgcgaaggatcagctttccgaagccgactgggaagacgtcgaagacacccttctgcttgccgatgttggcgcggaagccagcgaacagctcgtcgaggaactgcgcaacgacgcccgaatcgcaggccagtccgatccggacgaagtgcgtgctgcgctgaaggacaagctgttgaagctcgtaggcactgacacggatcgccgtctcaatgccaataaggagggtgccaacaaaccaagcgtcatcatcatggtcggtgtgaacggcacgggcaaaaccaccactgcgggcaagctttcccgcctgcttgtttccgaaggcaagcaggtcatgttgggcgctgccgataccttccgcgcggcagccgccgaccagttggaaacttggggtgccaaggtcggcgtcccggtcgtgcgttccgacaaggacggcgccgatccggcgtccgtcgcattcgaggccagtgccaaggccaaggaagagaacgccgacgtgctcatcatcgacactgcgggccgcctgcagaacaaggcgaacctcatggacgagctcggcaagatccgccgcgttaccgaaaagaaccttccggtcgacgaggtgctgctcgtgctcgacgccaccaccggccagaatggcatgacccaggccaaggtgttcgccgaagccatcggcattaccggtgtggtgctctccaagctcgacggctccgcaaagggtggcattgtgatttccgtgcagaaggagcttggcgtgcccgtcaagcttgtcggcctcggtgaaggcccggacgatctcgccccgttcgatccggaaggcttcgtcgacggcatcctcgcctgagctgattgcgctcccgagaaagcctccccgcgcggggaggctttctttttacccccgaccagtcctatttcgcctatatatggcagatttgccggttcgtccgctggtttctcgcttatatatggcagatgcttttggagaaagtcgacttagaaggtatatgtttacccccgaaagcaccttttttgcgagtgagagtgccatatatgggcgaaatgtctcgtgtcagtcctccaaatctgccatacataaggcagatacgctgaaaaatgagctgatagtggtttggcctgagagcggtgcgcaatctgaaacaaaacgtgccagccgctttattccgccgttttcggttgacgtaatggcgagatggcgttaccttgctgtaacacgtcgtaacgttttcaaaacgcgggcggcgttccataccgttttgtcagccccatacgatggggccggaaatgtgaactcaaaaagaaagaaaggggagggtgacatgggtcagcttgattctggaaatgccgcgtggattttgacgtccgcgtcccttgtgttcctcatgacgccgggtgtggcgttcttctacggtggcatggtccgcgcaaaggccgtgctgaacatgatgattatggaggcggccgctctgtccgtcacaatggtgatctgggtgctgtggggctggtccatcgcctacgcaggcacttcggtcggcggtgtcttcggtgatccggccacaggcttcctgctgaaggattccatggtttccgacggcggtgtcttcacgtcggcttcgctgaactccaacaactacccggtcagcgtcgatgtggcgttccagtccgcattcgccatgattaccgtcgctctgatttgcggcgctatcgctgaacgtgtcaagtactccacgtggatgattttcgttgcgctgtggattaccttcgattacgctccgctcgcccacatggtgtggaatggcggtctgctgagcgctgacggcgcgatctcccaggctatcggcgctgccgcccacgatttcgcaggtggtacggtcgtgcacatcaatgctgcagtcgccgctctggtgatcgtgttgatcatcggcaagcgcaagggcttcggcacccagccgttccgtccgcacaatgttccgttcgtgatgcttggcgctttcctgctgtggttcggatggttcggcttcaacgctggttccgcgtttgccgccaatggcaccgcaggctacgcttgggtttccacttccgctgcaaccgccgccgcaatgctctcttggggcttcactgagaagatccgcaccggccactacaccgccatgggtgccgcttccggcatcgtcgcaggtctggttgccatcactccggccgccgatgtggtttccccgctgtgggccatcgtgctcggtgccatcgccggcgtgctcacctgcctcgcttgcggcctgaagttcaagctcggctacgatgattctctcgacgttgtcggcgtccacggcgtcggcggcttcaccggcactgtgcttatcggcttcttcggcgaaggtaccggtctgttcgcgggcggcgactggaagcagctggttgtgcagctcatcgttgccctcgttgccatcatctggtccgctgttgtcaccggcatcatcgccttcgctctggagaagacgattggttggcgtgtcaccgaagctcaggaagtcggcggtatcgatcttgccgatcagggcgaacgtgcttacgattttgctggtaccgccagctctgttctcaaggaggtgaagtgagatgaagctcattaccgctatcattcagccgcataagcttgacgatgtcaaggaagccctcgctgccgcaggtgttcacggtctgaccgtgtttgaggctaacggttacggccgccagcgtggccacaccgaggtttaccgtggtgccgaatacaccgtggatctcattccgaagattcgcgtcgaggtgctgtccgatgacgccgatgccgagactctggtcggtgtgatcgtcaagtccgccggctccggcaccatcggcgacggcaaggtctggattgccccgcttgattcggtgacccgcgtgcgtaccggcgagaccggctctgccgctatctgataattcattcggatagatattaagggcccccgggcttaggttcgggttatcaatagacagatccccgtacgtgcttcgcgccgtgcggggattttcatacgtttttcgcgtcagattgtctgcttcggatttccccgctttcgcttttatctgctcagatttgattgtttttgcgaagattcataaggatttgctatgacttcagcggttgatggtcttaaacaacgtttcatggatataagtcagccggatgccgacggcgtgtaccgcaatggtgcggcgaaacgtaaggctcgtacggatctggccatggattgcctcaaacaattgtggcaggaggcttgccagacggtgtcttttgacgttccgcagtccggcattggtcttggcgcggtgggttcgttggcccgcggccaagtgggaccgagttccgatcttgacttggtggtcatttatgagcctcacgcactcactgaccggcagctcaatgagcttgccaacaaattgtggtatccgatttgggattcgggtcttgatcttgaccagtcggtgcgtacccgcgcgcagtgcgaggcggtgaccgaccatgatttgcctgctgcgatgggttggctggatgtggtgccgattgcgggcgatacgcagctgatcgaatccacggccgtctccattttggagcgttggcgtagggccgcccgtaagcgcttgcccgaattgttgggttccgccaagtctcgtttgggcgagttcggccgtatggcgtatagcaatcagcctgatattaaggagtctcgcggtggtttgcgtgattccgtgctggtctccgcgcttgccgcttcttggcttgccgaccgcccgcacggccagtatgacgatgccgtcgaacggttgttggatgtgcgcgattgcattcatttggtggccaataaagacacgaatatgttgctcgctccttatcaggcgagggtttcggcgatgctgggtttggctgatccgacgttgccgagcggcgagcgtgaggcgaagtcgattgatgatttgcagacgttgcttgcgcgtgttggtcgccagatcgcgttttcgcttgattccacggcttctcgcgctgagcattcgttgactcatgagaagcctcgttttgcgtttttccaggtgttccagcctcgtggcggcggtaagcgtcaggcgcctacgtttgatgtggtcgcgcccggtatcgccaagcatgaggaggagatcgtgcttgcgccgggtgccgatccgaagtccgatccgtgtcttgcgttgcgggctgctgttgctgcggctgagtttggtttgccgatcgcgcccggcacgttgcagaatctgaagtcgtgtccgatcgatgatcgcacgtggaatgatgagtcgcgtagtctgttcttgcgtttgcttgcgagcggtcccgcgttgttgcaggtgtgggaggagattgattttgtcgatattccgggtcggctgattccggaatggttggcgattcgtaatcgcccgagtgcttcggctgcgcatcggtatacgattgaccgtcattcggttgaggtggtcacgcggcttggtcgtgaaacacctcgtggaaatcgatatgatgatcggcattatcaggcgttgctgttggctggtattttgcatgatgtcggcaagcgtccgggggttgccgatcatgcggcggagggtgcgcgtcatgcgtccatggtgttgaagcgcatgggttttgaccgtgacattatttggtgggtcacgttgttggtgcgtgagcatcttacgttgtcggagtttgcgactggtcagaatccgaatgatcctaatgttggtgacgagttggcttctcgtcttgatcatgatccgctgctgcttgacatgctgttcgatctgactcgtgctgacggttcgtcgttgggtgccacggccggcgagaccatttccaaacagtacggctggagtaaatggcgcgaaacccttgtccgaaccatgtacaacgccacccgctaccacatgtgaggccgcgtaggctgtgagcgaatgcccggcaaagcgacatggttgccgatgcggtacccgccgcgtcggcggaaacccatcgtttaagaaaaagtggggaacatatcaccttcggttcacttaagcaaatcacaaccaggggaatgggcacccgtacggaagatgtccccaagttgtccacttggttatccccatttggtggataactcgatatgttttccacatagttatccccagtatgtggataactcgggttttttcggctttcttatccacagcgaaccgattcgcgcgtgtcgggtgattccgatcctgtcaatgcggagattcctccagaatctcatcgcaacatcattcgtgaagtggcacaggtattatggtttttcccggtacaccacacatcgaagagctggagaagcatggcggagagcaattcttggaacaatggcctgaatcaagggcaaaaccgcggtttttcaggcaatggcagcatttccggcgcgtcgggaacggctattcgcgacgccatcttcgaccgtgtgccgccacatgacgacgccgccgaaatggcggtgctcggcggcatgctcatgagcaaagacgccatcggcgaagtctcgcagatgattgacatcaccgacttctaccagccgcgcaaccaaaccgtgtacgaagccatcatcaacctgttctccgcatcgcagcccgtcgacgcggtgctggtggccaaccagctgctcaaagacggcgacctcgaaaaagtggggggatccgactatctgcacagcctcgtcgcatccgtgccgaccgcagccaacgcaaccttctatgccgacatcatccaccagcgtgccatcctgcgcaatgtgatcgcagccggcaccaaaatcgcacagctcggctacaccgccgaaggatcccaagccgaagacgtcgtcaacctggcacaggccgaagtctacgaaatgtcgaccggcaaagtgaggcaggattacgcgccgatcggcaccgtcatcaccgataccctcgaccaaatcgaccgactgcaaaacggcgaggtttccaaaggcgtgccaaccggattccgtgacatcgacgacgtgacgcaaggcctgcagccgggccagatgatcgtcgttgcaggccgaccggccatgggtaagtccacgctcggcgttgatttcgcgcgagctgcggcgctgcaccacaatatgacgtccgtgatcttcagcttggaaatgagcaaaaccgaacttgcgcaacgaatcatttcggcggaagcgaatattccgctgtcagccatgcgccgagcggaagaaatcacgcaggaacgttggaatatcctcaataatctgcaggataaactgcagaacgcaccattattcatcgacgatagtccgaacatgagtttgatggagatccgtgcgaaatgccgccgattgaagcagacgaacgatctgaaattagtggtgatcgattacctgcagctcatgacttccggcaaggccgtggaaagccgccagcaggaagtgtctgatttctcgcgtgcattgaagctgcttgccaaggaattggaagtgccggtggtggcgctgagccagctgaaccgtggccccgaaatgcgtcaggataaaaagccgcagctttcggatttgcgcgaatccggttctatcgaacaggacgccgacgtggtgttcctcgtgcacaggccggacgcctacgacaaggaagatcgcccgggcgaggccgatatcatcatggcgaagcatcgtaacggtccgacgcagacgttcaatctcgcgttccttggcgcatactccaagttcaaagatatgccgcaggactaccagagccaacaggaggtatagcatggcgtggaactcattcgcaacgccgttgatcggcaaggccgtgcgtgcggcctcccgcctggcacatggcggcggcagcgcgttccccggcaaaatcgtggaacggatcgacccgcaattcctcgcatgcaccctgcagcagctaccgcttggcgtggtgctcgtgtctggcacgaacggcaaaaccaccaccacgcgcatggtggcaagcatgctggaatcgttgggattgaaggtattcaccaatccgaccggatcgaatttcacccgcggcgtggtctcgtcgctgctggccgaagtctcgctcggcggcaaactggacgccgacatcgccgtactggaactcgacgaagcgtacgcggtgcatttcgtcaaacaagtgcaacccgactactgcctgctgctcaacgtgatgcgcgaccagctcgaccgtttcggcgaaatcgacaataccgcacgactgctgagcaaagccgccgaagcgaccaccggaaccgtagtgctcaatcgtgaggatccacgcatcgcacgacttgctgacgtcgcacatactgaagatggtgtggaagtgcgctatttcggtcttgacgggtcgttgcgcagcttcttcccgtccgacgacgacatgcgcacgacagtcgatactgcatcgtccgcaaatattgagattgacgatgctgcagtgattgcgaaaactggggaaaatgcagaaaaatcgggagatgcggcaattgcggaacagctaccagctgacgtgaccttgcttgccgtgggcgaccatcgtgccagtttcggcatcgacggtgaaacgtacgaaaccggtgtgagactggaaggcgtgtacaacctgtacaacgcggcggccgcgctggccgtcgtgcgagcggtcgtagccgacgcgcaagcaatgttcctgccgttcgagcagaacgtaaccgacgaactattgcgacaagtgggaatctcacagcgcatgatcgacttcgcgcattccaccacgcaagccatgatcgacgcggcagccgaagtcactccggcgttcggacgcggcgaggtcatcgacgtgaacggctcgccggtggagctgctgctcgtcaaaaaccccatgggattccgtctgtcgctcgcatccttcacccctgaaggctgcgacaccatgatcgccatcaacgacgaatacgccgacgggcgtgacatgagctggctgtgggacgtggacttctcctcgctgcgagacaccggtgtggccatggtttcgggcgtgcgtgcctgggacatggcgttgcgcctcgaatacgatcaggtgccggtgaatagcgtcaacacggaacttgaagaggccgtctcaacgttcgtgaacgcgaatccgggcacccccaagcacatttactgcacatacacggcaatgctcaaaacgcgagccgcgctcggcaaaatcgccgaagtcgccgacgctggcgtgggcaaataacagcgcgaatccgcgcaacgcatgaaaacgcatgaagaacgtatgaaccgcatgagggagacgatatgagccaggtaatcgacatcgtgtcgctatatccgaaagacatgaacatctacggcgactccggcaacgtgctcaccatccagcgccgtctcgccctatacggctacgagccgcgcgtgcacgcctacaatcagggcgacgcgtggcccgaacacgtcgacatgattctgggcggcggcggccaagacaccggccagaagaaaatcatcgacgacttcttcaaacgcgccgacctgctgcgatcgctggccgccggcggcacccccatgctcatgatttgcggtctgtaccagctgttcggcgaatatttcgaaacggtggatggctcccggctcgacggcatcggcgtgatcggcgcgtacacggtcggtcaggaagtgcgcatgatcggcaatctgaccgagcattccgccgatttcggtgacatcatcggctacgaaaaccattccggccaaaccttcctgcgcgaaggcgtgcagccgctcggcaccgtcgacgcggatagcaccggcaataatggcgaggatcatacggaaggcgcccgcgtcaacaatgtgatcggcacatacatgcacggctcgctgctgccgaaaaaccccgcgatcgccgattttctgatccgcaccgccgcagaacgccggtatggttcgttcgatccggccgctgcagggcagacggaagcgcagcgtgcggaacttgatcgcatcaacacgattgccagcaacgcgcgtcgcgtggccatgtcacgcccgcgctgattgttttcgcgctgtttcgtagttttcgcgttttcgtacgctgtgagcatacggcagcgagtcttccgcagaattgtaacgattgactagtttcgttgacgttatttgtgaagaaaatgcgatagagtgggtatcaccatcacctaaggaggtaatcatggctgattttgattttggtgacggcctgcgtaaggtcttcctcgccggcgttggcgctttggcgaccacggttgagaagagccaggaaatcgttgatgatctcgtcaagaagggcgagttgaccgtcgaacagggcaaggccctcaacgccgaactcaagcacaaggtcgcggaggtcaaggtttcctctgaagccaaggctgcagaggaaaccaaggaagccgaacctgaagccaaagccgagtaacgttcaatcgttcacatcgccgtctgctcgtcgcatcacgttcagacggcgatttgttatgcggaacttgcgaaacatgcgaacggccgtgtgcggaacgtaagaaacgtgcgaaacatgcgaaatgcgaaacatgcgaatcgcatgaaatacacgggacgcaagtctcctcatgaatcccactcatcgtaatccgaccaacgtttgcgagcagcgatatgtctttgaattctccgatcgagccggatgcggcccgccccgaaagcgtggagccggtcacactttccgaccgagtcaacgcggtgatcaatccgacggcgaacccctcgtccgacgcggctgcggcaacggcagccaaatccgcgggaaaaacgggaatcccgcaatcgcaaggcaagcagaacgacgcaacctttacgcaatccgaaaccatcggactgttcggcccgcgtaaagactcattctcgcagcgctatcacctgactcgtcgaggcaaactgaagcgacttgcgcaaatcgcgcaaatcgtcaaccaattcgacattgtgcacggcctgacccccgtcaaaatgcggctcatgttcgaagcgcttggcccaactttcgtgaaagtcgggcagatcctatccatgcgatccgaaatcctgccccaatcgttctgcgacgaactcgccaaactgcgcgccgacgccgaccccatgccgtacggcaccgtcctgcaagtgctggaagacgaatacggacgcccggcaggcgaaatcttcgaccatatcgacgccacaccgctcggatcggcaagcctcgcgcaagtgcatcgtgcgaaactcactaccggagaagatgtggccgtcaaagtgcaacgcccgggcgtgcgcgaaaccatggcacaggatgtgtccatcatgcgcaccatcgcacgaatagccgccaaaaccatgcccagcgcccaagtggtcgatctctccggcgtggtcgaagaactgtgggacaccttcgaagccgaaaccgacttcatgatcgaagcgcgaaatctggcggaattcaaacgattctgcgagcactacaaatacatggactgcccgaagccatactccgacctgtgcaccgaacacgtggtggtcatggactacgtcgaaggcatttccgtctcgcatcctgatgagctcatcgaagcgggctacgatctgaaggaaatcggcaccaaactggtcgacaattacgccacgcaagtgcttgacgaaggcttcttccacgcggatccgcacccgggcaacatcatggtgcgcggcgggcagatcgtgctgctcgacctaggcatgacgggccggcttaatgccaaaacccgttccgtcttgaaagacatgattttcgcggtcgccaaacaggattcgcccgcgcttgccgacggtctgctgcgtttcgccggtgccgaggccgatccggaggattatccggcgttattggccgacttggatgtgatcgtcaaggaattcggcacagtggatttggccgagctggatatcgccgccatgctcaccgcattgacgcaaatggcgcaacgacacggcattgaagtgccgagcaccgtcaccacggtcgggcgtgcgctggtcactttggaaggcctgctcgacgagttcattccagacgtgaatatgattcagatcatctccgaccatatcgccgcaagcacgtcgaagaaggatttcgccaaggatgaggcgaaatcgctggttatcgaaggtcatcaggcgctgcacagtctgctcgctgccgccaatgagctgaaagtggcctcccgcatgcttacgcgcggccagttgcgcgtgaatatggagatggtcggctcgcaggaaccgatccatctgcttgccaacatggtgaacaggcttacgatggcgctgatcgtcgtcggattgttcatcggctcgtcgatcgtgtactatgcgggcatcaaaccggtgattttcggtattccgatcgttggtttcctcggctatgtgatcgcgttcgttttgtccgtctggatcgtgttcgacatttacttcaagggacgttccaacaaaaaacggtagttttttgtctataaacgctgtcatcgaaattcgtatgtcgggatattccatttcatccatgatgttggaagcttctttaatagcacgaaaggaccaaatgggtttgtacgttatcggagatgacggacgctcagcaaacaggcgatcgcgtattgcgtagatgacggttttttatgatttatgggctaatctcagaagagacagattcgatggccgcgaacggtgagaaccaacgcgagagaatgcgcgagcggccgcgtaagggaggaaagcccatgtccaactcattcgtcaacaaggcgctgctcggcggcgcagtcgctgcaggcgccgcagtgtgggcgatcgcgccgcgtacctgccgcaactatgtgccagccgtgcccgacgtgtggtacgcgcatcgtggcctgcatgacgcgggttccggtctgaccgcgcagtatgccaatgaaagcggcgaatatgtggcgctggcacgtcgcatggccatgaaggccggctatggcagccctagtgtagccggggcgatcgctccggagaactcgcttgcggcattcgcagcggcttgcgaagccggctatggcatcgagcttgacctgcagatgaccgccgacggcgaaatcgtggtggtgcatgacggcgatctgatgcgcgtcgccggagatccgcgccgtatcgccgatctcacgtatgatgagctgacccgtatcccgctgttcccgaccgacgcccccggtgccgccgtggctgcgccgctgccgggttcgcttgaaaagccgccgctggtcaccacacctgacaacgctccggaaggatacttccagcatgtgccactgttcgccgacgtgctcaaagtggtggccggccgtgtgccgatgatcgtcgaatacaagttcgacgacaattccaagtgggatccgcgcgatgtcgagctcatggaaaagggcgacgcgctgctgcaggcctattccggcgcgtatgtgatcgaatcgttcaatccggcagccgtcaactggtataaggagaaccgtccggaagtgtgccgtggccagctttcctggtggccgcaaggggaggagaagccgtctgatccggccgcgctcgccaaggaatatgcggccggtgcgctgattttcgactggatttcccgccctgatttcgtcgcctacgattggcatggcggcaacagtccgcaggtacggttggctcgtttcatgggtgccgttcccgtgtcgtggacggtgcgcagccgcgacgagctcgcacagtgcgatgactggttcgaccatcatattttcgaagcgttcgtccccgacgagcagtagaggttttacatatgatttcggcctgccgccgcatgatttgcgttgtggcaggccgtttttattcgatttacttgattgactgattgggttgattcggttgagctctgatgcggtcagtcgatcacgccatatagacggtcgccggcatcgcccaagcctggcacgatgtagcacttgtcgttgagcttctcgtcgacggcgcacagcaccagcttgaacttaatggatgggtcgaggttctcctcaacgaacttcaggccttccggagcgcccagaatgcacacggcggtaacatcctttgcgccgcgctcggccaggtaatgtgttgctgcgaccagcgtgccgccagtggcgagcatcgggtcgatcaggaagcactgacggccgctcagatcgtcgggcagacggttcgcgtacgtgatctgctgggttgggttctcctcgtcgcgcttcatgccaaggaagccgacctcagcggacgggatcatcttggtcatgccgtcaagcatgcccaggccagcgcgcagcacaggcacaatgatcggcgctggggaagcgatgtgcttgcctaccatcggagcgacgggggtctcgatcggcttgtccacgacttcgacgtcgcgggtggcctcgtaggcctcaagcatcacgagttcggaaacgagctcgcggaacgtggaggacggggtgttcttgtcgcgaagaacggtgagcttgtggtccaccagcgggtggttcaaaacatgaatatccatgtcttctaagcgtagtccataatcgcgaggaaaagcgcgggaactgggaaaggagccaagaaagaaactgaaaatcgtataaaaaagcaacgaaacttaagaagagggaaagcgccgaaccacgaaagcgcctgtcggcgcaaaggccgctcgcagcggcaaaaaatggagcccggggctatgcatggcccgacgcggattcctattctacagatgctgcagaccgtacgctacgtcgtgtcgcgaattgatggtgcgagcgccgtaaaacacttccggtagcggtacagaggtgggtgcagaggcaggtgcaggggacgggtacggaacgcgttactccagttttccgcgacgccacagattcgccccatggcgaaaatccttggccgtgacgaacagattgccggccgtgtgcatcaaacgggacgatttcgtacgtacctgcttttccatggcggaaatgccggaatcgctgctatcggaaccttccgcagctttcaatcgtgcgatcatattgcgtgcctcgatgcgcaatcccaacgcaaccacgtcggtgaacgcggccgcacgttccagcgcaaccgcaaaatcgccggtgaacgcgcctgcgagaatcgaatcggcaatatgcgcaatgtcatcttccgtgggcgcctgatcgacgccggcaatcgccgaggcggtagtggcaaccggctctccagcgcgccacaaccgcgcgatcgactcgcgattcttccgcatccacgtgcgcagcagatacagccgccacagaatgcccggcagcgaatccggctcggcgctgctccacagttcggcgatcacgtcaacgccctcgcggtccaccagcgtgagcacgcgctccaccagttcggcatcctgcgtatgatgcacgcggtccaacagtgcggccgccgaagcgtggctcatctcgttgatttgcgccggatcggcacctcccgcgatattgtcggccatcatctggtcgagttgccccgggcgggccggacgcggcgatccggtgttggtgaaaccggcggaacggcttggtacaaccgatccggaaccgtaatgcatgctagtagacaatgggcgaaaccttttgaatatcgataatgctgggaccttgcggcgtatcgattataaacagcgctacggcggtgccggtaggcatgaacggcgttttggcgatgagctgcttggagagcgctttgcgggcgcatagtccgcgcaagtgatcgaacatgcctccgataaccggtcggtgcatgcagatcgccgtggtttcgcgggtctcgagcgtgagctggatctgcttgaggaacgccagccatgcgatggtcgggtgctcggcgaaggcgtcttccgtgagcgcgtcgatgtgttccatcgggcgttcggtctgccagctaagcacctgcagtgtttcctggcagcgcagccatggtgaggttgcgaggcgggttgggttgtagcaggcgagttcgcggttgagtgcgaatgccgcggccgcgcctttcggagtgatcggccggttcgcgtcggtgcctttccaggatttgcgcgattcggctttggcgtggcgcacgatcatcagattttgcgcggtcgcggcaccctcctgtacgcggtccacaaaaatggcgagggtgtctttatcggtggaatgcgtgaggattttacgtgcttcacgtacggaaacccacacgatatcgttgatttcgcctacatccgcgcgatgcacggggccgaatgcgtcaagcagatgttccgcatcatctccggaaatcggttgcgccatccaatacaacgtgtgcttggtgtcgacggcgcgatcgtgtgaatgccgggttttcttgccttcttcggacagtggatattcgacttcgcacagatacgggccgagtgcgatggaaacgcctgtctcctcgccgatttctcgcactgcggcatgacgatgcgattcgccctgctcgagtttgcctttcggccagctccagtcatcgtactttggtcgatgcacgatgcacacttcaatgctgttgagttgttcctttggagttttctgcgctgcgattgctggattttccgcgatttcgctaccggttttccaccgccatacaatacccccggcggcttctacgacacgtctcatgctctcgctcatatctttcattgtaagtggttgggcacgggtttccccatgattgcgcgacggcaatcgtgccatccgagttttcctgcgttttcccacgatggtgatcgcgtatgccgcaacataggaaatggccgattctgcaacagcagaatcggccatttcctatggtttagtgccttgccggtcggcgcgtatgcttcttgatgagatattcctgggaatcgaccagcgggcgaccctcctcatccttcgcatgacgcacgtaggttccgtcggctgccatatgccacgaggtggtggaatcggccatttgcagatccacgtacttgatcagctcgtcgatctgctccggagcggtgatgcgtaccagcgcttcgactcgacggtcgagattgcggtgcatcagatcggcggaaccgatccacacttccggacctgcggccggaccttcaccgatctgcgggccatcggagttcgcgaatgcgtagatacggctgtgctcgaggaaacgacccagaatggaacgcacgcgaatgttctcggaaagtcctggaacacccggcttgagcgcgcagatgccgcgttccacgatgtcgatcttcacaccggcctggcttgcacggtacagcgcgtcaatggtcttttcgtcaacgatggagttgaccttgatcttgatccatgcttccttgcctgcgcgtgcggcatcctcttcgcggcggatgcgctgaatcagaccggaacgtacggtacgcggcgctaccagcagacggtggaagctcgacttcggcgcataaccggacagctggttgaacaggcgggtcatatcctggccgaccaccggatcgcaggtcagcaggccgagatcggtgtagatgcgggcggtcttcggattgtagttaccggtgcccacatggcagtagcggcgcaggccgtcggcttcctgacgcaccacaaggctcagcttgcagtgggtcttcaggcccacgatgccgtacaccacgtgcacgccggcgcgttccagcttgcgtgcccatgcgatgttggcgtcttcgtcgaagcgtgccttgatttcgaccagtgccagcacctgcttgcccgcatgcgccgcgtcgatgagcgcgtcgatgatcggggagttgctggacgtacggtacaacgtctgcttgatggcgagcaccttcggatccgccgcagcctgcgctaggaacgcctgaacggaggtagagaacgaatcgtacgggtgatgcaggaggatatcgcgttcgcgaatcgctgcaaaaatgtcttgcgcgcgggacgactccacctcggcaatctgacgattggtggtcggcacgaacgaacggtacttcaagtccggacggtcgatgccgccaagttcgaagagcacggtcgcatcgagcggtgccggcaggcggtacacctcatcggcgctgacgcgcagctggtcggcgagcagctgggaaaggaacgggctggtctcgtcggaaatctcaagacggatcggcggtccgaaacgacggcgcagcagctccttctccatggcgttgagcaggttctctgcatcatcctcttccacgtcgatatcctcgttacgggtaacgcggaaggatcgcgcttccttgatgatcatgcccgggaacagggattccaggtgcgcgatgatcaggttctccatggtgatgaagccgtagcgcacgttggtggcatcgtcgtcggtcatgtcgtcgacgggcacgagacggttcaggtttccaggaatcttcacgcgagcgaagtgggacttgccggaagccgggttctccaccagcacggcgaggttgatggaaccgccggaaatgtacgggaatgggtgggccgggtccacggcgagcggcgtcagaacagggaatacctgctgacggtagtagcgtgacaggcgctcctgttcggcggcggtgagcttgtcccagctcagcagcacgatctgttccttcgccaggtcgggaagaatgtgatcgatcatgtagtgcgcgtgctcgtcctgcaggcggtgcgcctgctcgctgatggcgcgcagctgctgccttgggctcaatccggaggcggccgtcacggcgatgccggtgtcgatgcggcgcttcagacctgcgacgcgaaccatgaagaactcgtcaaggttgttcgcgaagatcgcggcgaagcttgcgcgttcgatgatcggcagatcttcgtcttgggcaagttcgaggactcgcttgttgaacttcagccagctcaactcgcggtcgaagaagcggtcgttcggcaacggctcttcgccggcctgaagctcacgcttgtcgtttttatcggtctcggcgatatgctcagctatctggctgcgcaagatcgccttcgagggtgcgtcaaaaatctgtgccatactttcctactttatccttaagtagctggaaatgctgtaaaaagccggcaaaatttagctggagttaacattcgttcgctcattgtgcaaattagggtgtcgacacgccgtgtttttgtcgcaaacgcacgcaaacgaacaaacacgccttgcgtttcgcacacgatggagcatttttatgattcttgcgatcgtaaagcaacagttgcgacaaatacggaacatcagccggtttcggtttgcgattgccggattgctgagcataattacgaagtacaagaacaacttaaagagcagagcccacaaagagtgtatggccaagataggtcgttacgttgaacgggcattggatagacttaccgttacgacgatgttgttgtgtagagattctgcccttaaggttcttgcaaggaaggcccgctcggcgggccttcctttttgtttgcctgttctcagggagtttttcgggaaaacgacggacgccgattatcgtcgttgtgtggataacggtgcataacacgccggggttgtggataactcgcgtcctccgaccacagggccggttcagcttgcaatggtgctcgccgaagcttttcaatcgacggtatgagtaatgcaacgtctttttcgaatgttcctccggtgccgctgccgtcgggcgggctgttgccggtcgccggcgcgatcgcgccgcaagcgtcaccgccgacacaacgcagaaccgtctctgcgcaacggttctatacgccgccgggatcgaatcgcggtggaacgcaactggttggcgctgtgcctggaacgtatggcatggttgcgcaatgcggtcgcgcatcggtggaggaaccctgcgatatgggcaatgtggtggttatcgactccgtggtggcaggagtgggcacgagcactctggccgccttactggtccgcgagctgagcgaacgcggcctcaaatgtgtgctcgtcgacgccgatctgcaaggaggtgggctggatgtgcttcttggcgtggaaaacgaggacggctcacgcttcggggaaatcagcgctccgcttggcaatatcgacggcaaagcgctactgcgggagctgccaatctgggatggcgtgccactgctgtcctgcgatccttgggaaaccgaaaatccgcattcgtgggaagtgcaagcgtgcattcatgcgctatcgcaggtgcgaagcgtggtcgtcgtcgatatggggcaatggaacggactgcaggatttgacggaactgcgcaaggccatccgcattaccgtggtcgaactgacggtacttggtcttgcgcgggccaaagcgaatctgcgggcgcatcacggttcgatcggagaacacgatgccgcaacacaggaacgggagtttctcgtaggcgtgcaaccgcgcggaaccgtacgcgaccatggcacgacggcaatcgaggaagcggcggaatacctcgactgcgatatcaccgcggtcatcaaaccggatgccaagctttgcagcgaactcttggaagggcttggactgcgcaaacccaatcgtacgaatgcgaaagccatagcgacgttggcggatctcattcaggaagcgttgggagaaaagagcatcagtcatggaactcgggccacttagcgatatcgcatccgagccgggcgttaccgacatcgcggtaacctgcgacggaacggtgtgggcggatcgcggccaaggtatgcggccgcatacattgcgcgtaccattcagcagtccccaagccatccgcgatttcgctgtgaggctgtgctcgcagcttggcagaaggctcgacgacgcctgcccgatagccgacgcgtccacggtggaaggcgtgcgcgtgcacgcggttatcgcaccgctcgttccgcaaggcgccgccatcagcatacgattgccggacgctgttgcgcccagtctggaatctttggcggaaaacggcatgtttccaagcggatggatgcccttgctggaaggattcgtggaacgaagggccagcgtgctcgtgaccggcggaaccggagcaggcaaaaccacgctgctcaaagcaatgcttatgcgatgcgcgccgggggagcgcgtcatcaccgtggaggaggtgcgcgaacttggcatgctcaaccatgccaaccacgtgtcgctggtgacgcgcgacgccaacatggaaggcaaaggcgccatagggctgtcgcagctgatatgcgcgacgttgcgtatgcggccggaccgcattgtggtgggcgaatgcaggggcggcgaaatcgtggatctgctgcgcacgctgaattccgggcatcgcggaggcatgaccaccttgcatgccaatcaggtgacggcggttccctcacgcttggtggccttgggattgctctccgggctgaatccgcaagccaccgcggcgctcgcgcaagacgcgttcgacgtagtgctgcatgtgggccgagtgggaggcaggcggcgcatcacgcaaataggacggcttgaattcgcagagggaaaactgcagggaaacctattggccgggtggaacggcaaccaaatgcgggcttcgcaacagtggcctgatttcgtgcgcgtatggagtcgttgaatcgaggtgggcagatggaaagcctcagcataatttgcgcggtactgtgcggactggccgtatggctgtggcctcgccgaaacgtatgcgatgtgggcgaacgggcgggaaacgtagtggggcgcgcaggcgaaagccttgatgaaaaacctgatgaaggattcggtgggcggtctgacggaatcgaagaggcgaacatgccggcgaaaccattgcccgccatcggatgtgtggcgtgcgtggcttccctccgcgcatccgtgcgcagcggagccacattggtgcaggcgttcgaagaattgggtggaacgccgttcgccacacccgaacttaccaggcttcgcataaccatggtgatccgcagccgatgtccgcccaaagagcaatgcggccaagtcgaacggttgagcggcgaattgtatgcgtcctgccggttaagtctgacgctcggatgcgaaaccggccgatgcctgcaagcggtggctgaatcgttgaaacggcaacgattattggatgatctgcgtgccaacgcgttcgccatgcccaaagcgacggtgaaacttctgatggcgctgccgctgctcaccgtgcttttgggggaaggcatgggagcgcatccgttgaccttcctcttttcaggggtcaggggttgggcatgccttggattcgcttgtgtctgctacgggttcggactcgtatggatacgcgcgttgatgaggcaagacgatatggacggcaagacggcatgaatggtatgacgatatgaaaggaattatgtaatgactggtatatggacgctgatggcggcggtgtgcgcggctgaggcgatgtggctgaagcagtggaggccggtccgcgtgccagccgaccttgcgcccgccgaacgagtgcgggaacttccgctgccgctggtattggagatgctcagcgtcgccatacggcagggatcctccattccacgcgcgctgattgccgtgggcgatattgctgcgggagatttcggtgcgggactgcggtcggccggagaacagttgaataggggaattccttggaatgacgcatggccggatgatggcgatcttgcggtggtgcgtgatgcgttcgcctcgtcatggcacagtggcgcctcgccggtggaacgtttggaaacagcggtcgaacaattggattgggatgagcgttcgcagatcgaacaggctgcggcaaagctgtcgatccgcctgttgctgccgactggactgtgctttcttcctgcgtttgttgcggtggggattattccggccgttatgtcgtttgtgaaatgacggcaggaaagcaacgtgggaaatttgcctcgggaaatgtgggaaacggacaatcctcgaaaaacgatgttttgcggataaatgtggatgacacgccgtggttgtggataacccacgtcctccgaccacaaccttgaaaaaacgttccgacgagcacgatgatgcgcaacactgggtgcactcggctatccggccgaggttgttcgaacgaaaggaacgccatgaacaacgaaacgccgatcaacgtcgatggctcgctaggcctgatgggcaagacagggcagctgctgcatgccatgcgtgaacgggccggcaaagcggtatgcctgctggacgcgcgtatgcgcacgctgaccgtcgaaccggaggaaggcgctgccactgccgaatatgcggtggttttggttgccgccaccggattcgcagccgttttggtgggcattatgaaatccgatgccatcaaaacgctgctgaccaacatcatcaagaaagcgctgagcgtcgggtgattcatgctgaggcaatggtggaaacgccataccgatgatgccgatgagggagcggccaccgcggaattcgcggtggtgctcccctgcgtggcggcggtggcgattttggtgttgtgcttggggcgtgcgtccgtggtgtctatgaattgccaggatgcggcggcggccggtgccagggctttcgcggttgatgatacgggcggcgaatcgaaggcgaggaccgcggtcatggcggctgcgggaggttcggcgacggtacggttcgagcgtggggcggacttcgtcaccgtcacggtgcaatgccctgtggtgccggatccgaccggtgtgctgcccactcgagttaccggcaaggcgacccgctacttctagcgttgctccgaagcgtgctggtctctgcgcagtgagatgcgggattgttggttgtggcctgtgcatggaggtctgtgaggtttggagcttgcgacatacgacgtgtgaaacatgttgtgaaacactattggcaaccatttgatggatgcgggtcggaaaggaatggataatgtgaaacgccttgtgaaacattggtttgcttggattcgcgggtccgatgagggttcggggaccataaccggtgtggctttgatcgcagtggccgccatcatgctgggcgcggccgcgtcggcgggcaatctgctgctgtgcttgcatcgcgcgcagaatgcggccgacctggcgtcggtagcggcggccaatgcgttgtattcgggatcgtccgatccttgttccgtggcggaacgcactatatccggcaataatgcgacgatcggatcctgcacgatagaaggcgaggatgtgctggtcgaagcgcaggtcggcacgcaagtgccattcgtatcgcatgtcggcaaacagtcacgggcggggccgattgtctgcgaataagcgtggtgcggaacggtacattgtgcgggaaatcgcgcttcgtaaaaagggatctttctacgtaaaggaacattcgttccacaaaacacggccatttgtatggaaagccgttcgcatgtggcgtgtggggcgaatcgcggttatcgtactgaagtatgagcgaaacgtcatgtgtgaatgcgaccgttgccgttgtcggcaatccgacgtcaaacaaaggcaagggtgccgaggtcggcaagcaggtggttgagctgctgcaagaggccgggcgcaagcatggcttcaacgtgatcgacgtgaccggcgagagcttcgacgattccttggcgaatgccaggaatcgcaggaacgaatacgactacttggtggcggtcggcggcgacggcatgattgcgcttggagccaatgccgtgggctgttccggtaaaccgttgggtattgtggcgacgggttccggcaatgatttcgcccgcggtcttgagctgccggtcaatcgcgtggaaaccgctgtcgacggcatcgtcggcgcgattgtgcgcggcacgcatattgacgtcgatatgggcttggccacgtcgttgcagggcgggtatgccgtcgattccagtgccggcgatgatctggtcagcgattcggacgtgccattgcgtccggcggtcaaccgcttctacgcgggcatgctatcgtgtggtttggatgcgagtatcaacgaccgtgccaaccattcccgcttgcccaacggttcggtgcgctatttcgtggcagcgattgtggaattgacgcatatgaagcggtatggataccacatcaaagccacgttggccgatggaacggtggaagaaagagacattatttcaccgttgcttacggtggccaattcacggcatatcggcggaggtattgagatctcgccgtattcacgattctcggatgggctgcttgacttggtatggctcgaccacgtgcccaacgttgccgaatgcgtggatgcggtgtctcacgcgtatagcggcaagattctcggatgcaaggtgtttgggtggaagcgtgtgcgcgatatcgaaatcacacgtgcgcaagagggagatgagccgccggtcttgatggcggacggcgaatatgttggtcacctgcctgtcaaagtcgtagttcaagaccgtgcgttgcgtgtgctggtgccgccggccgtggcggaaagccaggccgccaacaccgaagagaaagtgctggaagccatcaagcgtgatcaccgtgatccggtcaccggcaaaaccgacacctactacgcgaagcgctcgcggtagcgcgagcacattggccacgagcgcgaacgggaagcgtttggaccattcgggcttgccgatcttgccccacttgtatttgagcgccatggagccgatgcggcccgcgtttacatgtattcgttcaggtgcagcgtctgtgccgcgacctgtctgatgacggtgtcttcaatgtcgggatgcagtctgatcagcgaaatcaggccaacgatgagcgtatagaacgtctcatgctcgttggtgatgggcatgccatgcaatttctcgaaatcgcgcactgtcgaattgcagatgtattccgcaattcgatcggccactcggtcgatgaatttgatgtacagtcctgcgttgccgtcttcgatcatgcgttggctgaacgggccctcatcggtgatgagggagcgggtcagccgtaccacgtcgtcgagtgctttcgagatgttgccgacctctcgattggcgttccactgttccaattgcgtgatcacttcgtcgataacgtcgtcgagtacggcgtccgcgacttggtctttgtcttggaaatagtggtagaagagagatctggtcatgcctacgcggcccgcgatatcgctaattgttattttcgaaaagcccttttccaggcagatctcgcgtgctgcgcgcacgatttgcgcacggcgtgcgtctccgactgttgttgcggaagcgttgtgctgtccgtccatggctttctctccttcgctcgagtggcgtctctcacctgtgcgacacgttgacactctgtcaatttcttgactgccctcagtctaaaacggaaattgacatgatgtcaattctgtagtgtcgctgttgttaatcccagcttaaacgttgctgcgaggcttgtccccggggacacgcgctgcactgttacgggcaggctgtgcagccggtctttgcgaaaaaacgtgtcgtaattaatcggtagcctagtggcactactgcggaaggaattgcgatggcactggcactctatagaaggtatcgtcccgacacgttcgacggcgtgatcggtcaggaccaggtcacggttccgctgatgcgcgcgctcgacgagaacaagctcacgcatgcctacctgttctccggcccgcgcggttgtggcaaaaccagttccgctcgcattcttgcgcgatgcgtcaactgtgcgaaaggtccgacctcgcatccgtgcggcgaatgtgaaagctgcaaggatctcgccacgggcggccccggttccatcgatgtggtggaaatcgacgcggcctcgcataacggcgtggacgacgcccgtgagctgcgtgagcgcgctggtttcgcgccggcccgcgaccgctacaagatcttcattctcgacgaggcccatatggtcacgccacaaggcttcaacgcgctgctgaaaatcgtggaggagccgccggagcatgtgatgttcatcttcgccaccaccgagccagacaaagtgatcggcaccatccgctcccgcacccaccattacccgttccgcctggtgccccaggaggttatgggcccgtacctcgagcagatctgcgaggacgagcatatcgaagccgagtcgggcgtgctgcgccttgccatgcgtgccggcggcggctccgtgcgagacaccctttccgtgcttgaccagctcatggttggtgcggttgacggcagcattgcatacgactctgcggttgcgctgcttggcttcacgcctgacgctctgattggcgaggccgtcgacgccgttgccgacaaaaatggcgaagcgctgtatggcgtgattcagaaggtcgtggtcggtggtttcgatccccgtcgattcgttgaggatttgcttgcccgcgtacgcgatctgctggtgcttacgttgggtggagcgcgcgcggaaagcgtgctttccgacgatgcggccgccgagaacatggatgatttgcgtcgtcaggcttccgctttgggattgtctgcgttgacgcagatggctgacacgatcaatgcgacgcttgccaatatgactggtgcgatttcgccgcgcatgcgattggaattgcttgccgcgcgcttgttggccgggcgtgaggaagggacggctgtcgttgcgtcatcttccggtatgcccgattttgctggcgattccggggcttccgccgctgcagaatcgctgcgtggatccatggctggctcgcgccgcggtacgacgagacgtgcagacggtgttcgggcacaggattccgcgtcggcaattgatgctccttccgcgcctgtgaaaccggctgtgcagccgtctgtggcgccgatgaatcccgccgacgccgtcacatccggcgtggcttccgtgcttgctgacgtgcaacaggcgatgaatgcgacgacttccgtcgcttccgctgcgcctgccgcaacttccgtaccagctcccattcatgacgaccgcacccccgaccagaagtgggatgctttggtggctgcgcttcctgaggatgtgcgcggttatgtgaaccgcgaaaaagtgcctcgtgtgctactgagcggcgaccgtctgtggatcaaattcgacaaggcgctcagcaaatacgcgtttgccaaagcggtggcaaaggaatcggtggacggcaataccgaagtggtgaaaatcgtccgcgccgaagtgcgtaaggcgttcggaccgagcgtcacgctcgcgcctgccaaaaagctggcggatgggtccgaatcggtgccgtggagcaaactcagcccggaagagcagagcaagatcaatgcgcaactcgtgcaggaacagcttaaagcggccacgctgctgacggccaatcttggcactgccgcaagtctcgaatcctccggcaaggagccggccggcacaagcgcgaagagcgccgaagacggtggcaatgccggagattccggcgatgaggagggccatcgagctgctgtcggtggagccgaggaagtcgatccatgggcggccccgacgcaggaagtccatcatccggaacggcctgttccggatgatgacccttgggttgcatctgcacagccgatgcaaccgcaatcggtggtcgcaagcggcgtcaacgatgtgaaagcgccggaacaacatgcgaaacatgtggctgttcccgatgtcagcgataacgttgatccttgggcggcaccgatgcctgtaccgcagcaagcgccggtggacgacgatccttggggtaaccccatgccgattcaggcaggatcggtggatcccatgcctgctccaacggaacctgaggcggctccgaagcacgccaatcaccagcatcgcgcaccgcggcaggacgcggcaccgcagcaaggccagccgaatgccgatccgtggagccagcagttctccgcgccggcgcagccaatgccgcaggtcgccgcggaagatgacgaatattccatgagcgacgagtcgatcggggcgtcaaccgcgttaagcgtggacgatctgacccgactgttcgaggtgaaaaaagtcgaggatttcgggccggatgatgcaaaaaacccgcgcaacatgcagcagaagaagaatctcgacgactgatggcggtgcagtcgcaagtaaaaatgcgaaaccgagcaaaatcgacgaatcaacgcaatcgtaagcactgcataatcgcgaatcttatggaaaccaaggagaggtgaaccatggcactggcctatgacggcgccatccaacgactgatcgacgcgttcgcgcacctgcccggcatcggaccgaagggcgcgcaacgcatcgccttctacctgctcaacgcatccgacgaggaatcacaggggctgatcgacgccatcactgaagtcaaggaaaaaatacgattctgcgacatttgcggcaacgtgtgcgaaaccagcccatgcccggtctgcgccgatccgcgtcgcgaccacagcgtgatctgcgtggtcgaagagccgaaagacgtgatgagcatcgagcgcacgcgcgaataccgcggcctgtaccacgtgctcggcggcgtcatcaacccgatggccaacgtgcagcccagcgacctcaacatcgccaaacttatcgaacggctcaaagacggcgaagtcaccgaagtgatcctcgcgctcaacccgaatgtggaaggcgaagcgaccaccagcttcctgtcgcagctgctttcgcaaaccgacattaaagtcacgcgattggcgagcggcctgccggtcggtggcgaccttgaatatgccgacgaaatcacgctcgggcgtgcgctggccgggcgtcgtgtggtctgacatcatattcgccacatccgttacattgccggcatatgctgacgattgcgcaaacgttgcgcgggcgatcatggaagacccgtgcggaacgtatgtacgaaaaaacgcgcggaggatttgcgaggatcccatatattgttccgcatgttgggcgtgcaggggcttgacaaatcggatttttcctataattgaccagcctgcttagtatgttggcgggcaacacattgaagaagattggataagttgtggctctcatcgtgcagaaatttggcggctcttccgtagccgacccagaatcgatcaagcgcgtggcccgacgcatcatcgaaacgaagaacgccggcaatgacgtggccgtcgtggtctccgcaatgggagacaccaccgacgacctgatcgatcaggcgctcagcatcgactccaacccgccggcgcgcgagatggacatgctgatgaccgcaggcgagcgtatttcgatgagtttgctcgcaatggcaattcatgcggccggctctcacgcctactccttcaccggctcccaggctggtttcatgaccgacgcccagttcggtaccgcgcatatcaaggccgtgaagcctgaccgcgtgcgtcgtgcgctcgacaagggttccgtggccatcgtggccggcttccagggcgtgaatgagggtggcgacgccaccacgctcggacgaggtggatccgatacctccgcagtggctttggcagtggcgctggacgccgacgtatgcgagatctacaccgacgtcgatggcgtgttcaccgccgatccgcgcattgtgccgactgcacgccgtatccccgtcatcgactacgagtcgatgctggaaatgtcttcctgcggctccaaggtgcttgccctgcgttgcgtggaatacgcgcagcgattcgacatgccgttgcatgtgcgcagctccttctcccaccgtcgcggcacgctgatcgtgccggaagacgtcgatccgcgcacattgccgaacatctgagatatctgagattcgcattcggcaatcgcgagacatcgcaggcaatcgcaagaaaaccaagactttacgaacaaaggtaagaacatgagcgaaaacaacaaccagtccttgggagatctgttccccgatctggggccggaagtcccgatcatttccggcgtcgcacacgacaacaccgaatcgctggccaccgtgcgccgcgtgccgaacgagccgggcatggccgccaaggtgttcacgctgctggccgaggccggcgtgaacgtcgatatgatcgtgcaggcttccgcttccaccggcaccgccgatatttccttcaccgtgccgggttccgccgctgccaaggtgcgggatgtgttgcaggagaagcaggacgagctgggctaccagtccttcgacatcgacgccaacgtgggcaaggtggccgtggtgggcgtgggtatgaagacccactccggcttggctgccaagttcttcaacgcgctgagcgacgagggcgtgaatgtgctgatgatctccacgtccgaaatccgcatcgccgcgctggtcccgctcgagcagctgcaggacgccgtccgtgcgctgcacactgcctacggcttggatgccgagcaggtggaagccgtggtgtatggcggtactggtcgctgacgcaataccgcgcaataacaatcgaaaaaagacttgactggattgcttgaggcgtctcagccaagtcttttttattcccatatctgttttacagatatttttttcagataatctgcaaatgaaaaagcggaggattgctgaataatcaacaatcctccgcagtattatgttctgcagaaatcagatatcgcaatgtgcaatcatgcatgatcatgcgtaactgcagaacatatgcagatcgttatcacttcttggtgatgtagccgagtgccttcagcatttcggcgctttccaaagcgccgccggcagcgccgcgcaaagtgttgtgagcgagccccacgaacttccaatcgaaaatggaatcctcacgcagacgtccgatggaaacacccatgccaccctcgtaatccacgtccttcttgacctgcgggcgatcatcgtcggtcagatactggatgaactgcttcggcgcatgtggcaagccaagctcagaagccttgcttgtgtagttgaccagacgatcgacaagctcttccttggtcggattcttgccgaagttgatgaacacggtggcggtgtgaccgttgagcacaggcacgcgaatgcactgcgacgtgatcttcagcggaccgtcgaacggcacgatctcgcccttttcctcatcgacgtggccgaacaccttcagcggttccttctcggacttctcttcttcgccggagatgaacggaatgatgttgcccaccatttccggccagtcgttgaacgtcttgccagcgccggagatggcctgataggtgctcacgataacctcgcgcggctcgaattccttccaagcggcgagcgccggggtgtaggcctgaatggagcagttcggcttgacggcgatgaagccgtgcgtggtgccgagacgcttgcgctggtgctcgatcacctcataatgttccgggttgatttccggcacgaccatcggcacgtccggagtccagcggtgggcgctgttgttcgacacgaccggcgtttcggtcttcgcgtattcctcttcgatggcgcgaatctcagccttcggcatgttcactgcggagaacacgaaatcgacgttcttgaccacgtcttctacatcggccacgttcttgacgaccatgttcttcacgaattccggcatcggcgtttccatcttccagcgaccgccgatggcctcttcgtaggtcttgccggcgctgtgcgcggatgcggcaagggtgaccaattcgaaccacggatggttttcgagcagcgtgacgaagcgctgtccgaccatgcccgtagctccgagaatgccgaccttaatcttttcggacataacaacctctcgcttatgctggaacggtttcgtatgattttacgcttgaggtcgaccagccggccccaaacgacttcgtgggcggccacatgcgttgttcaatcttacgaaatccgcggaacaatgctcttcctctatccgcatgctggtctgccccgctttccatgcgttcccgtgcgcttgttgtcgatccgtacgatgatgcttcgcgaagcttctaccggcattttggatttcgcgatattcctggctccaccagcatgttcgtcaaattggtgtgatgcgggctggggtgggctggctgtctgcacaactcaggaatcgggctggttttgagggttgtgcagacggggatcgctggctttttggacggaacgctcgcgtacactggaaaccatgtcgaaggcatcagaagaagcgcaaaagcagttggaccgtatcgtggcgttgggctatccggatgtggccgatatgtcggccgccgcgttccgtgctttggcgcgcccgctcatccgtgcgctggaggattccgatttgggtacgcagattctgttggtgcctacgcgcgagttggtttccccggaatcgttgatctcgcgtacgtcgatcaatcgcatggctggtttcaccacgatgccgccgcgcgatatcgccagcttcctgccgcaggatggtttcgagccgccggaggggccgttctatctggtggtcgagccgcacaccggcacctgctatatcaaccgcgagccggacgtggcgcgcaagctgatcgattccgacgagcgattgccgttgactttggaagaggggcttgcgattgccacgcagcatccggaatggctgctggaaaagaacggtttcaacctgctgggctcgcgttccgctgacggccgcgtaccgagtatctggatgagccagaatgcgcctcgattgggtgcggtatggccgaattcccgtcatacttggcttggcaacgcgttttgcgtgtctcgtcgcggcgtcagtttgttccactgacgttctgctgatatttcgcagattttccacagattttccgcattccacagattggcgattgtccgactgttgcgacggccacgccttgcgtcgccgcacctagcgcttgaacagtttggcgatggcgtggccggctgcggcgcacattaccgatccgatgcccagcagtgtggcggtgacctgcgggcggcgcaattcgttgcggatgccgatcagatcggtcacgcaatggtcttcgaagaacacgcgcaattcgttgctggagtagcgtccgaccaagtctccccacgtgagcatgcgcgtcacgtagctgaccggattgttttcgcggaattcaaacagacgaatgccgcgcagccgcgatttcggaccgtagcattcaaagccgcaggtcggcgcgtagccaagatcaatgtcatgcacgtgcccgacgaacgcgttcttatggtcatgcccgcagaacagcgcgaaatagccgcccgcatcgcgcaatgcctgcacttcgccaacgttctcatccgcacagccgatcgcctcgccaagcctcgagccaggtctgcacacgtcacgattcaacacatagcaatgccctgcgaacgttcgcgcaccctccaccgcattcggcgtgtatgcgggcacctcgcgcaggcaatcgtagaactcctgcggcggaatatgctggaacgcgatcgccggaaccgccaaaccgtcgccattgcgctcgcccaactcgcgttgcacttgcttcagccattcgatcgcttccggcgaaggcgtgccatagccgtcggaatcagccaaatcccatccgcgcgaattcgacgcgtattttgcataggatgtcagcgattcccgtccgccggcagtattgccaacagtattgccggatttaccagtatttccagcatgctcgcaatcgttggaaatgctgcgatcgccgtcaaacgcattatccgcataatcgccggaattcaccatcatcacgctcatcgcaatgcgcccagacccgtcggaagcttcaatcggaatcgcaaacgtgcctggttcgagcgccaaaggagacgacctggcaacggggttcatgcaaccggaaaactcgcggtagatgtcgtcctgttcgtctgtgagaatgccgcattggaaatcgtggttgccgtaggttgcagcgaaggggattcgcgcttccaatgcaggtccgaggaatgctgcgaacgtgtctcgtactttctgccgcgtgctgtcgagtatggtcgcggcggtcgcgcgattgatggattgcgcccatgattcaagcttgttggcggatccgttgcgcccgtcgcgtttgttgcgtttcacgagtttcggcgagtcggtgccgatgccgtcaatcatccaattgtcgtcggtcgggggctgttcgagcaacgctttggtgaagggatgtcgtttgatgccgcggattttcgcttcgatttcggtgaccgctcgtatgtgcgtgcccggctgctctccgcgacggcgcaggaacgtgtcgatgtacgcggggtcgtatccgcgaatctggtcgccggtgaagacgatcagatcgggatgcgttttcttgatggcggcttcgatgagacggatcgtgtcttcgcgcacgtttggtccgtcctgaatatcggccatctgcagcacacggaaggtgccgtcgctgttgaatcgcaaggtcatgatgctcactgtaatgcggcaaatttggatatgaggtgaaaaagagacgaaaatcgtggtctgtccgtcatatggcggaatgccggcgatatatgggattggttgccgctactatgggcggcagtgcaggtaggtaacatgcacgtaacaatgtgggccggcagaaggcctgcccagctttacagataaggaggagtgatgggtcaggatcaatcttcagtgtttgatctcgcggcagtggctgcagcgtccaacggagggaacaacgacccgctgctgcctccggcgcgttatattggagctccgcaaaagcccagcaagatgccgtacaacaagtacgtcgcatacgataagcaggtgccgtttgattacccggagcgtacgtggccgggcaagcgactgcagcgtgcaccgcgttggtgttccgtcgatcttcgtgacggcaaccaggccctcgtcaacccgatggattccgagcgcaagttgcgtttctggaatctgctggtgtcgttgggcttcaaggagatcgaggtcggcttcccgtcggcttccgaaaccgattacgatttcattcgtatgctgatcgagcgtgagctcattcctgacgatgttacgatcgtggtgctgacgcaggctcgcgagcacctgattcgcaagacttacgagtgcctgaagggtgccaagcgcgccgtcgtgcacttctataactccgtgtccgtgctgcagcgtgaggtcgtgttccgcaaggataaagccggcatcaagaagctcgccaccgacgcggccaccctgtgcaaggagcttgagggcgaagcccagggcatcgacctgtattacgagtattctccggaatccttcaccggcaccgagccggagtacgccgttgaggtgtgcaatgcggtgatcgacgtcatcaagccgactccggagcatccgatgatcatcaatctgccggcaacggtggaaatgaccactccgaacgtgttcgccgatcaggtggaatacgtgtcgaacaatctggtgccgcgcgacgccgtggtgctgtctctgcacccgcacaacgacgagggcatgggcgtggccgccaccgagctggccgtgcttgccggtgccgatcgtgtcgaaggctgcctgctgggcaacggcgagcgcaccggcaacgtcgatctggtcacgcttggtctgaacttcctcacgcagggcatcgatccgcagatcgattattccaacgttcctgagattcgcaagacggttgagtactgcaaccagctgaagatttccgagcgtcacccgtatgccggcaatttcgtgttcaccgccttctccggctctcaccaggatgccatcaagaagggtcttgaggctcgtcaggtggccgccgatcgtgccggtgccgatttggacagcttcgtgtggctggtgccgtacctgccgatcgatccgaaggatatcggccgcacgtacgaggccatcatccgcgtgaactcccagtccggcaagggcggtatggcttacctgctgaagaccaaccacaatcttgatctgccgaagcgtctgcaggtcgagttcgacaaggttgtgcaggcgtacgccgatgagaccaagaaggaagtcaaggacgaggatatttggcgtctgttcaaggacgagtatctgccggtcgaagagtccggcgctactgcggctggtgccgtggtcggcgacagcaaggacgagtccctcgagcagtggggccgtctgaagctgatgaaggtgtcggtgtcttccggtgaagatggttccgataccgtgctgaaggctaggattcttgaccgtggcgtgaacgtcggcgttgatgagccggtggagcgtgaggtttctggcatgggcaacggcccgcttgccgctttcctgaacgcgctgagcaacttcggcatcgaggcttccgtgatggattacgtggagcacaccatgtccgtcggcaccgacgccatggccgcttcctatgtggaatgccagattggcgaggaagaggatccgcggattgtgtggggtgtcggcattgacacgtccatcgtcaccagctcgctgaaggccattatttcggccatcaaccgttccgagcgctgatttccgcggtttttcggctctcgtagctgaagggcttgtgatgtacttgcgagtacgtcacaagccttttgctttttgatttcataggattcccgagtttccggattttccagtttttccggattattcggaaactcggaaattcaggattgcgatccccagatgcagacattgttgccgattgcggagaacgtcatgaccggcttgccgtcgatctcgcgggggagtgttgcgaaccgtgcaatgtaggtcacgtcgtccaatcggatttccgcgtcgcttgcgcaacagttgaatccgttcacggcgccggaaagcggtttccacgatccgcaggtgatcggcccgtccgtcgaccttggcagattcgcatcgggagtatcgaagaaacttacgatttcaccccgggtgatccgcccgtcctcatggaacgtatatcgcgtcggacgattgatgccaacgtacgtgccatcatcctcttgcttgccgttgaagaacgtatgctgatcatgcagtacaacgttgtaatcgcctgtgatatcggcaatgccggtcggcgcgacggcaacggaaccgcggtattcgtacggtgccgcaaccagccagccgtcggaagtcggcagtaattcgcgtacgtgggattcgtaatcttcatcatcgccctcgctaaagcgttccgcgaaacgggtgtggtagacgaggaacatgcgaccgtccttcgaccgacgaatggcggaattatgcccctgcgagacttcgacatcggcaagttctgccggaccgccatcccactgtacggaagacgtcaatcgaatgccggtgccgcgctcctgattgtcgggaatctcaccgtacgaaatcgcgggattgccgttctggtccacgtacgggccaagcagcgattttgaacggaacagacgaatctgatatccgccggtgcgcccaagccagccgtacgacatgaacagataccaccatccgttttcacggatgaagtacgatccttcgccggaattccagtagcctccggccactttcacgccgtaataaggatcggcggaatccttgaccagcgggtatcgcacggaataatcgcgcaagccggttttcggatcgagcttgaacatccagatgccgccgaaccatgaaccgaaactcatccacatttcgccgtgctcgcacaatgcgggcgccgcgtcgatggcgttgatgcgcgtgtctttgagtgacaggtagcgggtcaggtcatagccgacggtgccatcggttttgggcttaagttccagcactttcggcacgtcggtgttccacaggttgctctcgtcgaaaccggaatataccaccggccccacgtacgtccagtcgccgtccacatggtcggcggtcaacagcacgatcaccgagcggaactggtcgccgttcaccgacaggtacatgcaccacttgcccatggtctcgttccagatcacgtcgggcgcccacgtgttgccgagcagatcgggattggaatcctgtttcggccatgcctgccaaatatcgccgagcagcgcgtacgggtcgcggctcagattgttatcgaaccgctcccaatgcaccatatccgtgctgcgcgcgcaccgacgatgcgtgccgaacagatagtagacaccgttttcctcgacgattgcgggatcgtgcacggccacccgcccggcatcaagcgtatgctcgatgccgttgggcgagatggcctgcgatgcggggcctgcattgcaggcgttgactgcgccggttgcgtcggctgcggaattcacggttgttgcgccgcttttgctcacttctgagacccccaaatgcactcgtttgcgccgattgcggagaatgtcatgacggatttgagatcattgtctcgcggaagcagcgcgaagtcgccttcataggtaacgccatccaaggtgatttccacttgattggtgccttctttgacctgccatgtgccagttttatctccgctgacagtgctgccttgttccagcttgatggtgactggtgtgttcacgcccttgtaatcggtgctgtctttctttgtggcatcttgcaatccttggaagaaggtggtcgggtcatgttcaacgagttcgtattcgccggtgagcttgctttcttcatatcccttggcgtcggccttggctccgacatattcgtacggtgctgcggtcagccagccgtctgacgtggtcagcaattcgcgaacgcgtacctcatgttcctctcctcggttggagaagcgagtgtgatagaccacgtatgcagtgccgtcctcgtccacgaatgcagagttgtgcccctgtgcaacctcgatgttggtgttgtcgttgccgctccattccacggatgccatgagacgtatgccggttttgccaagccagttgctgccgatggttgtggtggagattgcggtgttgccatcttcgtccacatatggaccggtgatgtctttggaacggaattcgcggatttggtagccgccggtttgctgcagtgcggcataggagacgaacaagtaccagtaatcgccttgtttcatgatgtaggagccttcgccggagttgccatggccgccggcgattttgatgccgtagtactggtcggtttggtctttaacggtttcgtaagtggtgctgtagtcgcgcagaccattggaagcgtcaagtttgagcatccacagtccgccgaaccaggatccgaaagtcatccacagatcgccgttgtcgtcatacttcacgcaggggtcgatggcgttgatttcagtatcaccgggggagaggtagcgtgtgggtactccattggaatcgagcacttgcggtacgtcggttttgctgacggtgtcatctcggaatccggagtagaccacaggacctacgagtgtccagtcgccttcgatgtcatctgcggtgagcagcacaatcgccgacttgtagttgatgccgtttaccgacatgtacatgcaccatttcttcatggctttgttgtagatcacgtcgggtgcccacatattgccggtcagatcagagttggctggctgcttgggccactcttcccaaaagtctcccagaatatctttgaactgagtgctgagattattggtgaacggttcccaattgactaagtcatcgcttttgagccatgcgcgatgcgagccgaaaatgtagtatttgccgttcgcttcgacgatggatgggtcgtgtgaggatccgcgttcaatgtcggagacgcttttgaccacagcttgtgacgggccgcctggtgctgagcatcctgccgcggcgccaagtagcatggcgcaaccggcgataagcgctactgtttttcgtaatgtgcggaacatgtctttcccctctccgtgatgttctgtactgcggtgtagtgacgtgcacgatttgtacaacgttgtagcatgcgatacagtacatcgttgtaaatcagaagtctaattacagaaggggcgtctaatgaagggcacctactcgttgctgtgctacacgcgcgaagctaccggccgtgaagaggcgaataatgaggacatcgcctacagcatgcatctggcgttgcgtgcgggcgaaaccgctgaatgggagccgttgaacgagaattacggtattttcttcgccgccggcgtgcctattcaggccgccaccgccgagtcgcgccgagcgtgcgtcgcggcggcgcatttcgtcgccgatccgttcgatgaggcgcatccggccaccgatgccgtcgcatatggcgcggtgatgccggggatcgacatcacgttgaaatccctgaagaacccgtatctgttccgccttgcggatggccgattcgcgctcgccgccacccgtaccgcgcgcggcggcgagccggatggctccgagcgatcggcgttcctgttggccgtcagcgacgatctgacctccttcacgcagcttggactggtgatgctgcgtaccggcggtggcgtcaatcgtccgtctgtcgcattcgacgcggacgcctcccgttatgtgatttcctggacgtcgaacgacggcaaatcgtatgtcgcaaccgttgccgatattgtcgccgcggccgaatccggcgagccgatcgatattgcggaagctgtggtaacggcggaatcaagccgttcctgcgattgcaatattcccaatgccgttcctggcaacgtgattgccgtcactgaagaagaagcatcgaaactgatcgaacgattcggtcgtatttacaacgttgaaacatcggtggcgacgcagcatatcgacatagcggcaagcagggaagcggcccgtgaagccgtgcaggcactcgccaaggtccgcgccgatctcgtctacagcgacggttccggtgccacccgtgccgtggattggaacaaagacgaacttgaggcgattgcgcaggacgccgccgaaggcaagctccagccgggcgacacgcgcacggtgagcggccgcatccgccaaaccgtatacccggtgccatttgccgtggagcgtgcggacccgtcggtgttcgcttggaatttcaacggcaagccgatgttcatgttcatcgccaccgacgataccgacggcaactgcgtcgatccgaacgatggcgccacgcatatgccgttgcgcatcgccgactccatcgaagcgctttccgacgcggcgggcggccgtgccaaggaaatcgatctgctcaaatgcggtgattacaacgctgaaggacgcgccatgaccggctgcttctgggcgccggaactgcatgtcatcgatggaaaactgtcggtgctcttcatgccatgcttcgatgggccggccaccaatccagacggcacgcccaacgatcgcgcgggcaagccggacatgtggacgggcagctgccatatcatgcagctcaagcaacattccgacggcacggatttcgatccgcgcgaacccgaaaactggacggtgccgaagccgattctcacaccgaccggcggcgtgctcaatcccatccaacgtatctcgctcgacatgaccgtcatcagcgattccggccgctggtattacgcgtggcagcaggtcggcagcatttggatcgccagcttcgatccggcccgtccggaacggcttacctgcgagccgaagcaggtcgttgtgccggaattcgcgtgggacaatatgatcgccgaaggtccgaacgccatcgtgcatgatggcacgatctacctgatttattccggctcgctggtcggcattgactacaccaccggtctggtcaccgctccggccgggcaggacgccgatctgaccgatccgaacgtgtggacgaagctcgactatccgctgcagaaatccggagtatacaacgggcaatggcagcttggcaccggccatggcatgtggtccaacgacgaggacggcaatctcatctatgtatttcacaatgcggaatacgagaatggacggtatggcggccgcgacgcccaggtgcgccgcgtgcactggtccaaggagggtatgccgatactggacatgcaggcggcggaagaactcaatccggactatgctgatataacgatgaaaatcgtggtttccggcaataaaggctgatttcgttggcttcagcgctgcaaggggcgaaagccggtgttggggccgaatgtatgagacgtttttggtgaaaaggggttgacatgccgaagcagaatggcgccaacggcgagcacgtggtgaccatgcgcgaggtcgcgaaggcggccggcgtatcgatcaaaacggtgtccaatgtggtcaacgactacgagttcgtgtcgcaggccacgcgagacaaggtcaacaaggccatcgacgagctcggctacacgctgaacgtgtccgcgcgcaatctgcgcagggggcagaccggcatcatcggcctcgccattcccgatctgcagatgccgtacttcgcacagctttcgtcgctggtcatcgaagaggccaagaagctgggcctgcgcgtgatcgtcgagccgacgcaatactcgcgcgaaggcgagattgaggtgttgcacggctcccagcagacgatgatcgacggcctgatctacagtccattggaacttgatcaggatgatgtcgaccaattggatgtggactatccgctggtgcttgtcggcgaacgcatcttcaccgacaaggtggaccatatcgccactgaaaacgtggaaggtgccaagcgcgccacgtcgtatctgctgcagaccggctgcaagcgcgtggccgtggtcggcgtgcatccgggcgagaaggtcggctccgccgcgctgcgctatcagggctaccttgaggcgttggaggaggccggcgtcgaattcgacgagcgtttggtggtcgagtcgggcatgtggcatcgtagcgatggcgtgcgcgtgatgaacgcgctgcttgactccggcgtggttcccgacggcgtcgtcgcgctgaacgacatgctcgcctccggtgtgatgcatgcgatccagatgcacaatctgcgcattcccgaagatatttcggtgatcggtttcgataattccgacgattcgcagtatttgtctcctgcgttgacgtcgattgctcccggtcttgaggcggtggcgcgtctgtcggtgaaattgctgaaggatcgtatcgacggagtttcgccgtcgaaggatctcaagccggagcagaaggtgttccgcaaggtttcgtcgtcgttggtggtgcgtcagtccaccaagctgcccacgaattccttggtggtgtgatcttccttccttctttttcttcttcttttggaagaaaggaagtgattggtgcctcggcgcttgcgtccggttttttacggattgccggtgccgaggtttttgttttccctttctggcgattgtctgttgccgggttctgcgattcgattcttccgaggagtcggatgcgagaaacacgcggtgcgttcctctgatttgttacaacgttgtaatagtgatatattcaacgttgtaaattactggaacagcggattgaaaaggaatagacatggctgtttacaacaatccgatcgtgcttcagcgcgcagatccttgggtcctcaaagttgacggcgagtactacttcactggctccgacccggaatacaactgcatcgccattcgtcacgcatcgaacatcaacgacttgcagaaagctcccgaaacggtggtgtggcgcaagcatgagtccggaccggcgagcatctatatctgggcgccggaactgcaccgcatcaatggcgcttggtacatctacttcgcaggcgccgcaacggatttcgaggcctccggcctaccgacccaccgcatgttcgtgctggagaacaccgatggcgaccccaccaccgacaactgggtggaaaagggtcagatcgtcaccccgatcgactctttcgcgcttgacgccaccaccgaggtgatcgacggcgtgcagtacctggtgtgggcccagaaagatcccgcgatcgaaggcaattccaacctgtacatcgccaagatggcaaacccgtggacgctggaaagtgagccggtcatgctcaccaagccggaatatgactgggagtgcatcgacttcctcgtcaacgaaggcccggccttcctgttccacgagaacaagatctacatcacgtattccgcctccggcaccggtgtgccgtatgccgtcggtctgctgaccgccgagcgcggcagcgacctgctgagcaaggattcctggaccaagagcccggtgccggtgttcaagacctgcgccgaaaacggccagtacggccccggccataactcgttcaccaagtccgaagacgattccgaagacctgatgatctatcactgccgcaactatacggaaatcaagggcgatccgctgttcgacccgaatcgtcatgcccgtgtcggcgtggtcaagtggacggagtacggccccgacttcggtgtgccggaacccgacaatctgtggaccccgaccaccacggacgtgttgccggccgatggcggcgctcttgcgggaacgccggtagcgaactgacttgcgtaatcgtaagaaacgttgcgattccaacaaaaacgaataattgaagattataaagaaaacagcttttccatcggcgtgtttccgatttgtacaacgatggaaaaagctgtataatcaaaattacaacgttgcaaacggcagtgcagctgacgaagcgtgaacgacatcgcaaacaaggttgttgatgaatgtcactgcaacggttggaggaaatgtcttgggagaccaaggggaaaaggagaaatccatgaagatcaagaagagcaccaaggctctcgcggccgcggcctccctggccatgatggccaccgtcggcctgtccgcctgcggtggctccggcagcagcgaaaccgatgctgatggcaagccagtcatccgcatcgcactcatcaagcgcagcacccagatcgaagctaagaaaatgaagctgcagaaggatctcgaggccgcctgcgactgcaccatcaagtgggacgaaatcctggatacccagtgggcccagcagtcctccaccgtgctcgcctccggcgacgtcgccgacatcaccatctggggctacaactccgacaacttcgcccagtatgactactgggaggatctgagcgatgatctcgatcagatgccgaatgtcaaggcatacttcaaggcagtgccgaacgccgaaaagttcggttccgatatcgatggtcacgtctggcaggttccgtccgactacggcaacgcatccggcgccaagtggtccagcggtcagaacctcatgatcaacaagtcttggctcgagaagcttggtcttgacgtgccgaagacttgggatgacctgaccaaggtcctcaccgcattcaagaacgatgacccgaacggcaacggcgaagccgacgagatcccgatgctgatcaaccagctcggcaccgcaggcttcaactggtgggatccgttcctgctgctcaacggcaccggtctgaacacccaggtggtttccaccgccggttccaagggcatctacatcaaggacggcaagatcggcaacttcatgatcaccgacaacttccgtcaggtcattgagtactaccactccctgatcgagaagggcctcatgccgaaggatattctgacccgtgatggctcccagaacaccgccgacatctccaacgacggcaagaccgccaaggtcggtctgattttcggctggaacaccggcaacttcggcgatctgaaggatcagtacgagtccatcgaagttccggcagctccgggcgtctcctatgaggaaaccacttgggaaccgcagttcgaagatatctacaacggcgcttgcgtcaaggctgatctggacgaagctcacaagaccgcagctctcaagatcatcgacaagtggatcacccctgacatgtccatggaatcctactacggcgatctcgatacctacatctccaacgagggcgacggcaagtacaacgtgctcaagttccaggacgatctctccaccttcggtctggcagaccgtggtctgacttgggtgtctgacgacatgtccgtctccggcgatgaagacaaggtcctcgctgagaaggacggcaagacctacgaaacccagcagtcccacatcggcgacaaggatctcatcccggcctatgtccgtctgaacgcagaagacaacaccaccgtctccaacaacaactccaacatcttcaactacgccatgccgctgatctccacctggattcaggacggcggtctgaccgacgatgcatggaacgagtacgtcagcaccatgaagcagcagggcgtggacgagaacgtcaagctctggcagaagtggtacgacaagaccatggctcaagagtgagcttaggtcatcccgcaaccacataattgaatatctcacataactgaatcaaataaagccctccctgcggtgagcattcttccgtgcatcacgggggagggcactctgctttttaaacacattcgcatcgattatcaagagagagggatggacatggcttcttcgcaaatcacaacatccgggtcgagcgccgacatcccggacaacgactacgtcgcgcgtcacaagccgcttccgattcgtatttcggctcatcttcgtcgttactggcagttgtggctcatggcattgcccgccatggttttcgtgttcatcttcgcctacattcctatgtacggcattcagcttgcgttccgtgagttcgtgccccgcaagggcttgactggcggtacgttcgttggcctgaagtacttccagaagttcttcgaatctccgcagttcgtgagcttgatgcgcaataccatcagcatcagcctttcgaccttggtgatgggctttatctgcccgatcatccttgctctgctgatcaaccagattggttccaagaagatcaagggcttcgtgcagaccatcacgtacatgccccacttcatctccacagtggttatcgtctcgatgatcagcatcttcctcaacccgaattccggcttcatcggtcgcttcttcaatgaagacggcaagagtgttctgggtgatccgaacctgttcactccgatctactggatcagcgaagtgtggcagcactgcggatggaattctatcatttatttggctgctcttgctggtgttgacacggccctgtatgaagctgcgaagatggatggcgcaagccgtctgcagctcattcgctacgtcgatattccggctattcttcctacctgtggcgtgctgctgattctgaacatgggctccgtgcttaatgtcggcttcgagaaggtcttcttgatgcagaactcgctgaacctgagctcttccgaggttatttcgacattcgtgtacaagatgggcttcgtgagtaatcagtacagctactcgacagctattggcttgttcaacacgttgattaatttcgtgttcttggtggtggccaacgccatctccaagcgcgtgtccgataccagcatcttctgacggtgacagggcaaagaaaggacattcaaaatgagtaattccgttgcgccagccgtcaagacggccaatgacgagattccatggaatccgaaggttcgccagaagaagcagccggcagactatgtggtcgattttctgatcggtctgctcgtggtcgcagtggtgatcgtggtgctttacccgctgtggttcatcgtgatcgccagcttctccaatgcgtcgctggtttcccagggtggggtcaccctcttcccgaaggggatcgacttcgcgggttatgccaagatccttgatgatgcgcgaatctggaccggttacaagaacaccatcatttactctgtggtcggcaccatcgtcaacatgatggtcacgctcccggtggcattcacgctttcccgccgtgagttcaaagctcgtcgtgtgattctgttcctgttcaccttcaccatgttcttcgccggcggcctcatcccgagctacctgctgttcaaggatatgggcatcctcaactccatgtgggtgtttattctgccgggtgctgtgaatgtgtataacgtgatcatcgcacgttcgttcttcgagacgtccattccggaagaattgcatgatgcggctcaggtggatggtttgggctacttccgctacttcatgaagattgtgctgccgctgagctcggccatcatcgccgtgattgcactgtactacttcgtgggtcactggaacgacttcttcaccggccttatctacatccgcaatcaggagaagcagccgttgcagaacgtgttgcagaacatcctgctggccaaccagatgaccacatccggtggcggttcagacggtcgttcgatgctggaacgtcagcaggctgcggatcagatcaagtatggcatcatcatcgtgtccacgctgcctctgctggttgtgtatccgttcctgcagaagtacttcaacaagggcgtgatgatcggcgcagtcaagggctgatcgccagttcgcgggttcgttccgctgacacaaagcagtgcggacccgcttctcaatcaataggacttcatttcctttctcctttcacaaggctgccgtcgtcatgcggtagcctttttcacatcccaatcgcaatgctttgctgactctacggacgcaagcaacacgaaaaacaaacgatataagtggtaaggtgacatcatgaccgcaacagacaacccattcggctacctgctcgtccatttcatcgaagatccggacggctatgcggaaaagatctatatggatctttccgatggcgacaatccgcgtcgttggattccgcttaacgatggcaagccgatattgacgtccaccattggcaccactggtgtgcgtgacccgcatatcattcgtaatccgcagactggaacttggtatgtgattgccacggatttgcgagtgttcggcggtgataatgcaggctggttcgagtggactcgtcatgccagtacgaatctcatcatttgggaatccgatgacttggtgcattggggcgagccgcgtatgcttgacgtttcacgcaagccggacggtacgcatcttgagttgggtatggcgtgggcctgcgaatgcctgtgggttcccgattattatccggaaggtcacgagggcggtcgcggagcgttcgtcatgtactggtccagcacgattttcaacgatgatgatcctgatcatactgatgatggcgtgtactgcaccgtgctgtggggaaccaccactgatttcacgcagcagacgtacgaatacggtggtgtgtttattgatacgggtggtgattccatcgataccaccatggtgcagcgtccgctgcctgacggtggggttcgtacgtaccgtatcaccaaagacaactctttcggcaatggtatttggatggactctaccgacgctcatcgttggtgggagccggatgcgcagtggacctgcgtgcagaaacatgttggtgccggttatgtgccggacggcaatcctggaggcgtggaagggccggcggtgtttgcaaaccatcacaatgatggctcggatgcggatgaatggtatttgttcgtggacgtgattccttccatcggctatcagccgatgcactcgaagaatctggattctggtttcgctccgttggatagtcctgattactatctgtccgagcatacgaagcatggcggtgtcgcttcccttacgaaagaggaatatgaccgcatcgcttccgaatatggtttgcagtgacatctgaatcgtcgatgccgaaagaggacatttgttcggccattttcggcatcgacgtcgcctgtgtttagtgcaggcttgatgtcggattcatgaatttcggcacgttgccgcctcaatacgttattataacgttgtaaacgttgatattccttggtatcaaacaaagaagtgccatttcgataatgtgatgaggtagcgtatgaagcgttttgcggtgggctatgaatttctgtgccgtatagtcatgatggtggttgttgccaatgtcgcatttcttgtgcacacgctgctcgggcttgtggtggctggtttcttcccctcgattgcggcgacctatgccacgttccgcacttggcttttggatgttgacgatcgttcatggagtatctcgcgcacatggcgtaccttccatcaggcatggctggaggagcttggtccggcaaataaattcggttggcctcaattcctgatatgggcatcgcttatttgggaatactggtttgttcagaataatgatcttggcactactggctttgcggtttcaggtgcgttgctgctgctgaatgtgctgtatggattgtttgtatttgtgagttggggcatacatgtcaatttcgcggagaagctcacgtgggtggtcaagacgtcgttgagcatggtgattgctcgccccctatgcagtttgatgattgcattgttgttcctcattgtggtgtgggcatactacacgtggcctggattgatgattgcttttggtattgcggtgcctgtgtttgctgcgatgatggctatctattcatggggtcgtctgcctggcatggatgtgcatgtgctcgagccagtgcttatcgatgacatgacgaaaaaaacagatgccgattcgcgttcttgaggtgttcttatgaagtattgcgtcaagtaatcttttcacgcgttttatgacgtattctcgtgagtgacgcatgattacgacgcaaaggagcgcatctatggtttcgtatgttctcgaatgagtgccgttgcagcaagtgaggttgctaccaggagaacattttgacgcgcagcaggccggcgcatggtatctgcttgagcttgacgtcgatcgcctgctataccccttccgcagagaggcgggactgccgcagccgaccgatgccgacggcacgttgcattggcgtcgcgcgttggctggtggcgaattccagtatgcgatgcgcgggcatggtcaggcgcatcgtttggaaatcgaggtgattgccgattccgcggaaagcaacggtgaaaacgcggcgtatgaagtgacgctcgacggcctgccattgcagcgatgaaaatcgcgatatggcagacgactgaccgtccgggggcgtctgccatggcgatccggtgattggaggatgctgatacgcattgtggcggcaacgatggtattcgttgccgccacaatgttttttgcggttgctttgccggttgccgttccggctggcgtcggttgccgtcaatgagttggtgccttgcctgccgccgacggtcgttgcgacggttattgggctccgtttgactggtcgtctccggagttgtcgccactgctgttaccgccgttgccgccgtctccggagttgtctccgccgttattgccgctgtctccgccgtctccggagttgccgccgtctccgccgtctccggagttgccgccgtcaccgtttccagcgctgttctgatcgctgttttgcgtaggatcgggtgtggtctgctcggtgttctcttcggccttcggcatctcctgattctgccgtgtctcggtcttctgcgcgccggtgccccatgtgccgtccgggccgccgatcttgccgttgtcggtcggttcggtgaaggtcagcacctcctgattctgcaatgcgagcgacatgaactcctcgaacagatgcgacgggtagcccgtggaggaaacgccatagcctgcgaacgatggcacttcctgcgcgctgccgtcttccgcaggattccaaatggcccacacattgagcagctgcggcgtgtagcccacgaacgaagcggccttctcgtcgtttgcggtaccggacttaccggccacctgacgtccgagacgtgtcgaaacgccagccgcggtgccatacgtggtggtgccctgcatggccttctgcaccagatggcaatcgttcgcatcgaacacctgctggttctcctgagccgtcttgtacagctccttcgaaccgtcggacgtgagcaccgtgtcgacgatgtgcagcgtgttcttcacgccatcgttcgcaatggtggagtggccttgcgccagatcccacacggtaatgccgttgatgcccagaatgttgtaggtggtgtcttcggcgatgtcttcctcaatgcccgcctgatgcgcgatcttggcgagattcgcggcgccgaggtgcttgttgacctccatgaacaccgtgttcaccgaattcgcggtcgcctgatagaggttgatatacccgtaattggtgttcaacgcgttcggcacctgcgcggtggttcccggcgtcgtttcaaacgtcaggccggaattgccgttgaagatggtgttgaaattcacaccctcctgcgcggctcccagcaagccgaacggcttcatggtggaacccggttcgaacgtggcttgcgtggcgttgttgagctgcttggtgaggtaatcgttgcccgcatacatggctttcacggaaccggtcttctgatcgaccgcaataccgcccacctgaatactttccggcatgccctccggtcgggtgtcgccgacctgctgaatctcgtcctgcatgtccttgtcgagcgtggtgacgatcttgtagccgccggtttccagatcatcggcggtgaacgccttggaattgaccagttcgttcttcaccgtggtcagcagatacccgttcgcgccggccatctggttgctctgctgtatttccgccacggcagggaactgcgcttccttcttctcctgggcggtgatgtagccgtcttccttcatgatgctgagcacgcggtcgtatcgcttttcggcctgttcctgattgacggccggatcccatgagctcggcgccggaatgataccggccaacatggcggcttccgacaaggtcagatcgctggcgttcttgttgaaatacgccttcgccgccgcctgaatgccatatgcgccacgaccaagataaatcgtgttcatgtaattgcatagcacctggctcttatcttgtgcctgcgcgatcttgatggccaggaacgcttctctcagcttgccggaatacgacgtggtttcgcccaaatagtagcgttccgcatactgttgggtgatggtcgaaccgccctgacggctgcctgtggtcagattcgtatacagcgctcgcgcgatgccatacagatcgatgcccttgttggtgtagaaggaacggtcttccgacgcgacgatggcattgcccacataatccggcaataccgcacagtcgatgatttcgcggttctgttccgcgtagctgccaatttccgtagtgccgtcggcatagtagacggtggttttttcggcgagggcgaacttttccggttcggggatttccgtggtgatatacatgtatgcgaacaggccgatacctgccgcgagcagcgctgcgaagatgccgagtacccacttcagcacgagatgcttgcgcttgttctgctttttctgaggtccgttggcgcggtgcgatccgtggttctgcggcttgggcgcgctatgggatgcgttgctgcgattgctgccggcgccgccgctgcgggcgcttcttgagcgtgagcttacgcttcgtgtgtgtgaaaccataggttccaccgtagctgattgacttgagaaatcaggtgaaaatggggtgagtttgcccttgggagggcattttttgcgcagctcttttacaaatcgacagtttgtgggtcgttgtctcaatatcggcttattttcagggttttatcagtttttcaggtgccttttcgctgtttcgcaggtatgcttgaaatttggtacctgtgaaacgcatatatgcatatatataacagaggagtcgtttacagatgagcattcgtgtagctatcgctggcgttggcaattgcgcttcttcgctggtgcagggcgttgaatactacaaagacacgaaggacgaggataagattcccggtctgatgcacaacaatttcggcggatatcgcgtgcgtgacattgaattcgtcgccgcattcgatgtggacgcgctgaaggtcggcaaggatctgtctgaagccatcgaagcgtcgcagaacaacacgatcaaattcgccgacgtgccgaatctgggcgtcgaagtgctgcgcggcccgaccaacgatggtctgggtgaatactatcgccagatgatcgaagagtccgacgccgagccggtcgacgtggctcaggtgctgcgcgacaagaaggtcgacgtgctcgtttcctacctgccggtcggttccgagcaggccgacaaggcatacgcccaggccgccatggacgccggatgcgcgttcgtgaactgcctgccggtgttcatcgcatccgatccggaatgggctcagaagttccgtgacgccggtgtgccgatcgtcggcgacgatatcaagtcccaggtcggcgccaccatcacgcaccgcgtgctcgcccgtctgttcgaggatcgtggcgtgcgtctggaccgcacgtaccagctcaacgtgggcggcaacatggacttcatgaacatgctgcagcgctcgcgcctggaatccaagaagatttccaagacccgcgccgtcacttccgtggtgccgcacgatatggatccgcataacgtgcatatcggtccgtccgattacgtggcatggcttgacgaccgcaagttcgcgttcgtgcgtcttgaaggcactacgttcggcgatgtgccgctgagcttggaatacaagctgcaggtgtgggattccccgaattccgccggtattgtgattgacgccgtgcgtgccgccaagatcgcgctcgaccgtcatctggccggcccgattctggctccgagctcctatttcatgaagtcgccggccgtgcagcacgaggatggcgaggcccgccgcttggtggaggagttcatcaagggcgaggtcgaaggcagcgaagagcagcttgacgccgatgtcgccgccgccaaggcagctggcaaggatgtgtggcgcgcctgatttttagttcgcctgatatgaggaatccccaatctaccgtcggtggattggggatttttaattacgatttggaaacgatgcgtatcgtcacttcttgagaaggggttcgacctgttcctcgtacgcggtcaacgcggtatcgatcacattgtgcatgtcgtagtacttgtacgtgcccaaacggccgccgaacaccgtcttcggctcggccttcgcgagctcctcgtacctcgcgtacagcgccttgtcggcctcggtgttgatcggatagtacggctcgtcgccacgctcggcgaaacggctgtactcctcccacaccacggtcctgtcgggattctgcgaggcggcgcgctccggattgaagttcttgaactcgatcgcgcgcgtgtacggcacgtccgcgtcggagaagttcatcaccgggcagccgaaatggtcgccctcgtcgtaacgcacctccttgaaatcgaccgtgcgccacttgagctcgcccagcgagtagtcgaagtagcggtccaccgggcccgtgtacaccaccggcacgccggccgcggccaaagccgccttgttgtacggctgggacccgtcgaagaaatcggtctccagggtcacatggatgcgcggatcgtcgatcatgcgctccatccacgcggtgtagccgtcggccggcaggccctcccacgtgtccttgaaatagcggttgtcgtagttgaagcgcaccggcaggcggttgatgatgcccgctggcaggtccttcggatcggtctgccactgcttgcccgtgtagttcttgatgaacgcctcgtacagggggcggccgatcagcgaaatgcccttgtcgttgaggttctggggatccttgcccgccagctcgccggcctgctcggccacgagcgccttggcttcggcgggcgtgtagtgcgcgcggaagaactggttgatggtgcccaggttgatcggcagggggtagacctcgccgtcgtgcgtggcgtacacgcggtgcacgtagttcgtgaacgaggtgaacctgttcacgtagtcccacacgcgcttgttggacgtgtggaacaggtgggcgccgtacttgtggatctccgcgccggtctcctcgtccatgtagctgtacgcgttgccgccgatgtggtcgcgcacgtcgatgatctccacgcgcacgccgagcctctccacggcctgctgggccacggtcaggccgaacaggcccgcgcccacgaccaccagatcgggatattccaccgcttcagtcataagaacaaccttccgaacttaaaacaaacacacaatattcgtgtgcgattcctcatcaagcatacccgtccgccctccttaacgcgggatgctcatggggaagcggcattttgacgtttgatttccctgtgtcgctggtcgtggggctggctgctccacggatcatggcatggtctgtgtggttcgtgcgcggcctgtggcgcgggttgcgctgcggttcgtgcggcttgcggcgcggttcagtccgggcatggtgtacactggtctttgcctccgcgtggcggtacgtcacccaactcccccagggcaggaatgcagcaagggtaagtggcctcttccgggtgcgtggaggttttcttatatcttcatgccattcgcgcataccgtagagccaatgccgtattctcgatgattatgaccgacgaattcaagccaatcatccgagacccgcacaagtccgcgaatatgctggaacagccggtcgcgcccgttcccgtgccgcagccgccgtctgatccgatcgaacaggtgctttccccacgtgaagtgagcgaagggcttgccaaagccgatccgctgacccgtcatccgcgcgtgtcgagcattatgctcagcgtggtgttcggtctgctgctgcttgccgccgcggtgggcgtctggtggttgggcgtgcgcacgatggaaggccaaagctatgaagacatggtctggtcgaaattcgatgcggccctgccgggatggctggaaccggtcgtgcatgttttcaccatttccaccgttgtaatcgcaacaagcgcgattatgtcgataatcgccctcgccgtacttatcgtaagaaaacgatggctgttgattgctcaactggcggtattcggcggaatctgctttgccgcagcagagttgctgaagccgctgctgccacgtccgtacttaattaatctggaatcaaatcccaataattccgcgccttccgggcatgtcatactcgcagcgacggcgggggtgatcctgttgtgcgcagtgcctcgcatgtgtcgtgcgttggtcgcggtgattggttgggcgtacgcggtgcttgtcggattgtcggtgatcgcggggcagtggcaccggccgaccgatgtgatcatggcattgctgatcgtcggcggagtagcaatgatcacgcttgctgcgacgtttgcgaacggcatggatgagcccggatcgcgtgcatcgtcgccttccgtgcagatcgtcggcagcgtgttgctgacgttcggtgtgcttggcaccctgtatggtgcgtacattatttggcagatccagccgggacttgcgatgagcgcggaatggacgaattccggcgcgcatctttccacggtgattttgactgcttccgtcgcgtcgctggtgttcggcctggtgctgaccatgcgtcagctgactgcctcgccactgacgcaacttgggcttgtcggcgcacctccggcccctccgaaacgttgacggcaaaacgtacgatcacgccgaaaatttccggcaccggtcgctcacgccacacgggcggtttgccaactgcatacggtcagtgagtattattgcgttgcaaacgctagtaataaggagtggctatggctaccggcagcaagctcgtgattgtggagtctcccaccaaggccaagaaaatcggtgggtatttgggctccgaatatacggtgatggcctcggtcggccatattcgagatcttgcgcagccgagccaggtgccggccgccgacaaaaccaaattcggcaagttcggcgttgacgtggaagacggattcaagccgtactacatcgtcgacggcaacaagaagaaaaccgtgtccgagctgaaaagcgcgttgaaaaaagccgacaccctgtacctcgcaaccgatgaggatcgcgagggagaggccatcgcctggcatctggtacagacgctcaagccgaaagtgccggttaagcgcatggtgttccacgaaatcacgaaggaagccatcaaagcgtcgcttgacaatactcgcgacgttgacgacgacatggtcgacgcccaggaaacccgccgtattctggaccgcctgtacggctatgagctttctccggtgctgtggcgcaaggttgggccgggtctttccgcgggccgtgtgcagtccgtcgccacgcgtttgatcgtggagcgcgagcgcgagcgtatggcgttcgtgcgtgccccgtattgggatgtcaccgcaacgttggaggcgccggatgccgatggcaataatgttgcgttcgattctcgtatggtgtcgttgggtggccgtcgtttggctggttccaaggatttcggcgccgatggcaggctgactgcggccggtgcgaaggatcaggtcgtgcagttggacgaggcgcaggcttccgcgattgcgcaggcgttggaatttgcaacgtttactgtcgcgtcgatggaaacgaagccgtaccgtcgccgtccggttccaccgttcactacgtccacattgcagcagaccgccggcaatcgtctcggcatgagctcgcgtcagaccatgcgcgcggcgcaaggattgtatgaaaacggctatattacctacatgcgtaccgattcggtgacgctgtcgcaggaagcgatcgcagccgctcgtgaagcggtcgtcaagcatttcggcgaaaactatctgtcggacgcgccgaaacaatatgccacaaagacggcaggcgcgcaggaggcccacgaatgcatcaggccggcgggcgcgaaattccgcgatcctgcggaaatcgcaagtaaagtgccggctgaccagctcaagctgtacacgctgatctggcaacgcacgcttgcctgccagatggcagacgcaaccggttccacggcgaccgtgcgactgtctgcaccgaccgaatcgaacggggaagccatgttccaggcttccggcactgttatcgagttccccggctttatgaaggcgaccggtgagggccgccgagcgtccgccgaatcgaagaagggtgatgcggctggaagcgttgaacaggccgcgcaatccggcaaatccagcaaagcggataagaagtcggatgacaatgtgtcgctgccgccgatgaatccgggcgatgcgctcgccgcggtggcggttggtgccgacggacacgaaactcagcctccggcgcgttacaccgaagcgtcgctcgtgaaaacgttggaacagaaggaaatcggccgcccgtccacgtatgcgagcattatttccacgattatcgatcgcgggtacgtgtatgagcgcggtcgtgcgttgattccgtcgtggctcgcattctccgtggtcaaattgctggaaacgaagttcccgcggtatgtggattacgagttcactgccgatatggaaagcggtcttgaccagatcgcgagcggtcaggagaccggcaggaattggctgacccgcttctatttcggttccggtgagggtgccgcgcagtctgcggacgaggcgcatgccggcttgcagcagcaggtcgcgcagttgggtgaaatcgacgctcgcgagatcaatacgattgagatcggcgacggtttgcatgtgcgcgtcggtcgatatggcccgtatttggaggatatgaaccatctggatgatgagggcaatccgaagcgtgcctcgctgccggatacgctcgctccggatgagctgacggtggaagtcggtcatgatttgatcgagaaccattccggcggcccgcgtgcacttggtgtcgatccggtttccgggggtaccgttgaagtgcgtaatggtcgtttcggcccgtatgttgcgttggtgatgccttctgcggatgctggtgctgacggtgacgctagtgagaagccgaagcgcggcaagggtgcgaagaaagccgctgccgatcgcccgaagatggcgtcgttgttcaagacgatgagcccggaatcgttgacgttggatgatgcgttgcgtctgctgagcttgccgcgtgaagtcggttcgtatgaagaggtggatgcgcagaccggtgaagtgcagacggttaccgtgcaggccaataatggtcgttacggtccgtatttgacgaagaccggtgccgatggcaagtcggatacgcgttcgcttgcttcggaagatgagattttcacggttgatttggataaggcgaaggaactgttcgcccagccgaagtatggccgtgggcgtggccgtggcgctgccaagccgccgctgcgcgaattgggtgtcgatccggagacgcagaagcaggtgaccatcaaggaaggcttctacggcgcgtatatcaccgatggtgagacgaatcgtacgttgccgaagcagtatgctcctgagtcgatcgaaccggccgaggcgttccgtttgctggctgagaagcgtgcgcagggcccgtcgaaaaggcgtggacgtaagggtgctgctggcaagggcggggctaagaaggctggtgctgccaaggcttctaagacttccaaggcggcttccgtcgataaggctcgtgccaatcgccgtgccaaggtgcgcgagttggccgataagggttgggccaacacccgtatcgccaaggagatcggttccacgccgaccacggtgaaggccgatgtggaatggcttgccgccaacgaaggttacacccgtcccgccgtagttcccgcccggtgatgaacagtccggtggactgttcgtagcagtgagcagcggtagcgttgcgaacgccgcaatgtagagtgatgaatatgcaaggcatattcatctcctttgaggacggacagcccggtgggctgttcgtagcagtgagcagcggtagcgttgcgaacgccgcagggtacagtgatgaatatgcagggcatattcatctcctttgaaggtgtagacggcgtcggcaaaaccacgcaggttgaacggttgcgtgcgtacgttgaggcgcaggggcgcgaatgcgtggtcacgcgcgagccaggcggtactgtgcttggcgtggcgattcgcgagttgctgcttggcggcgtggaaggttccgatgcggatatcgctccgcgtgcggaggcgctgctgttcgccgctgaccgtgcccagcatgttgccgaggtgattcgccctgcactggaacgcggtgccgtggtaattaccgatcggtaccttgattcttctcttgcataccaggctggcggccgcgaattgacggcaggtgaaatccgcgacttaagtatgtgggcaacgtgtgagctattgccgaatcgcacgtatctgctggatcttgaccctgtgcaatcgcatgcacgactgcagcatgatgaagatcgcatggaatccgcgggagacgatttccaacgtcgtgcacggcaggcgtttcttgacttggcaaaggcggaatcgcaacgtttccgcgtgattgatgccggccaatccatcgatgaagtatgggcgcatattcagaacgattttgcgcaaatcagtcaaatgaaaactttccaatcggaggccgcccagtgagcgtgtgggattcgattgtcggccagcagcaggttgtcgaacaactcaaagccatcgcaagtggcgatccgaaagccattgcgcagtcgtggctgatttgcggccctcccggatcgggccgttccaatgtggcgcgcgcgtttgctgcggcgttggagagccccgatcatggtcttgacgacgaaccgaccaaagccgtgcagcaggtgcttgccggcactcatcccgacgtgaccgtgcttgccaccaacaaagtgaccatcggcatcgacgaggtgcgagacatcatcactacgtccgaacagatgccgggcactgcgccgtggcgcatcatcattatcgaagatgtcgatcgcatgctggaacgcaccaccaacgtgctgctcaaggagattgaggagccgagcgagcatacgatttggctcttgtgcgcgccgagtgcgcaggatgtgttgccgacgattcgctcgcgcactcgcatcgtcaatcttgccgtgccctccacgcaggcggtggctgcatttctggagcaaaatggcggattcgagccgaaaatcgcggtgcgtgccgcacgtcttgcggaagggcatatcggcatcgcgcgcttgtatgcgaagaatgagcaggtgatgtctgaccgcgacgagctgattgtgggcgtgcttggattgcgtcgcgcgtcggatgcggtgctgcttgccggcaatcttatcgacaatgcgaaggcgcaggccgaagcggaggtgaaggtcaaagcggcagaggcggaagctgattttcgcagagtcaatgggcttggtgcgaaggatcgtattcctccgaaactacgtggcgcgtacaatgcgatcgccaaaaaagacgagctgaagcgacagaccacgcgccttacgcgtgacgtgctcgaccgtgcgttgaattcgatcgccagtgtataccgcgatgtggccgtgctgcagaacaatgccgaagattcggttggcttgattaatttggagaatcgttcgtcgattaccgatctgtcagtgcggcttacgcgcgggggagcggtgcgacggctggaggatattgccgttgcacgtcgccgcctggccggcaatggcaatcccgtactggtcttcgaagccctcttctgctctctcatcgccagttagggctagcggcgttggcacatactgttttcctgcgggcagatttttccagtcgctggaggtatcttcccgctggcagggcttttagggtcttgattcttccagtcgctggaggtattgcccgcttgtttgcccccgtattgtccgtattcttccagtcgctggaataatcttcccgctgacgggttttgttgagtccggattcctccactgactgggggaatcttcccgctggcagggcttctggtgtccgtatttctccagtgagtgggaaaatggttgtttggatatgattctggcttgctatcgtgcgataactgccggcaaaattgcaaaaactgcgattcagcgctggtagttggtggattcgcgcacgatcagttgcggtgcaagtgagatatgtgcggggctgtcggggccgtcgttgagtaggcgtagcgcttcggagacgatttgtttgaacggcgggcgcacactggttagtggcggcatggtggtgcgtgcgattggcgaatcgttgtagccaaccaccagcacatcttcaggcacgcgaagcccaagcgaatgcaacgccaccatcacgccgaacgcgatcgcatcgtcggcgcacaccacggcctccggttgcacgagcggttcggaaaacagtcgcatggcgcagttgaatccgcgctgcacgctacggtctccgaacttgttccattcggtttcggtggcaagatggtgcgctcgcatctgagtgtggaacatggtgaacagttccgccgattcgaaggagatttccttgccggccatgtatgccacggatgcgatgccacgttcagccaaatgcccgatcacgatttccatggctgcgttttcgtcgacgctcaccatggatgtgcggaacgagcattggcgtccgcccacttgcacgatcggcagtgtggaggcgtaatgttcaagctccgcggaaaggtaggctccccaggcgggcagcacgatcagaccgtcaacatggcggtctaccaacgactcgatgcgttgaatctgcgtggcctgatcgccgccgatgcccagcagcagttgctgcgaatccacgtcgatgacgggttcgatttcgtcaagcaactgcgcgcagaacgggtcgttggcggtcggaatcaccaggccgatggtgttggtgacggtgctgcgcaacgcgctcgccgcataattgaccgaatagttgaggtgtgccgcggccgctcgcacgcggcgtgcgatgtcgtcgtctttggtgcgtttgccggaaagtacgcgggagacggtggcgatggagacgttggccagcgctgcgacgttcgtgatcgaactgttcgccgaagctgccaaagccgaagcattgtcggttgtgcgtgccatgctctcctcccaaaatcattcgaagtattggattattcgaattactgccgtatctcaatcgtgtattcaagaataaaacagccacccgtcgaaagcggcaggtggctgaaagcaagtatcgcaatcatgcatgttgcattgcgattccataattgcgatgcaataactgaagattgttgaatatcttgcgaaattctgaaatcttcagcaagaggaagatcactcggcgttgacgaggatgttcagcaggttgtctgccacggtttcatcatcggcgccctgcacgtcgatgaccacggaatcgccctgcttgatgcccaggcccatgacggacaggatggagttagccggaaccgggttgccgccttccttggcgatggtgacggtgcagccggaggcggtgacggcctgggtgaactgtgcggccggacgggcgtggatgccgacgggatcgttgatgacggtggtgcgggttgccatgatggacactcctttgagtcgtgtgttgattgatttttggttgtgttatttgaaagtcgtgctgcttgccgagcgaaatgcctcggtgcgccgctgataattactatagcaccttttttcacgaaacgcagaaaacgtttaccggttgtgtgttacggcttaaagtgtgtatactgtgtgcaggctgaaaatgatttaccggcaaagacggtgggaatcacgcagtaactcgacgcgcaaagcaagcgcggaaatcacaacaacaaacgttcggttcgcgttcctttcgcgggcaaacaacaaaacaaggaaacaggtcaaaggagttcacatgattatcaaaggtgttggcattggtcgcggcgttgcagtcggcccggtcatccgtatggcgcagccactgccggaaccgtcggacgctccgcgtgcggaaggcattgctgccgaaagcgaaatcgcccgcgtggaaaagtccctcgcactggtgaacgccgacctgaaccgtcgtgccgaagaggccgccaatggtgacgaaggcgccaagcaggccgctccgattctgcaggccgtcgccatgttcgcttccgatccgtcgctggctgaatccatcaagggtctgattcagcagggtaagaccgccgaacgtgcagtactcgaaggcttcgccgcggtggaagacatgttccgtgccatcggtggctatcaggctgagcgtgccgccgatctgcacgatgtcggccagcgcgtgatcgccgaccttatggacgctcccgctccgggcttgccgcagagcgaaaccccgttcgtgcttgtcgccgaagatctttcccccgctgataccgcggcgctcgacatgagcaagaccctcgccatcgtcacctcgcagggcggcccgacctcgcataccgctattctggcgcgcgctcgtggcattgtggcggttgtttccgcagccgaagccgaaaacctgaccgacggcactaccgtggtcgtgaacgcggccaagggcgaactggtcgttgacccgaccgaagaggagatcgccgttgccgaagccgccaagtcccgtgcggccgcagccaaggaactgcgcggcaatccgggctccaccaaggatggtcatctgattccgctgctcgccaacgtgggcaagccggccgatgcgtccaaggcgctggaatatggcgctgaaggcgttggtctgttccgtaccgaattcctgttcatcggcaactccgagccgccgaccgtcgaagagcagacccgcgcttacaccgagctgctgagccagttcccgggcaagaaggtcgtaatccgtatgcttgatgccggcgctgacaagccgctgccgttcctcactccggaagacgagccgaatccggccctcggcctgcgcggtctgcgcaccctgcgcgcccacatggacgtgctcgaaggccagctcaaggcgctcgccgcagccgatgccgccaccgacgcgaacctgtgggtcatggccccgatggttgccgaccagcatgaggcggactatttcgtgaagcttggcaagagcttcggtctgaagttcgtgggtgcgatggctgaagtgccgtcgattgcgcttatggctgacaaggtggctgacgtggccgacttcgtgtcgatcggcaccaacgatctgacccagtacacgctggccgccgaccgtacgctcggttccgttgccaactatcagaccgcctggcatccggcggtgctgcgtgccatcaagatgatctgcgacgcgggcaacgccaagggcatgccggtgggcgtgtgcggcgaggccgctgccgatccggacttggccgtagtgctggccggtcttggcgtgaactctctgtccatgactccggtggcactcgacgacgtgcgtgtctcccttgccgaagtcaccttcgaagaggctcaggcccgtgccgaagccgccctcaacggcgacttctaccacccggccaactgagccgtactagctgtgcctatcgcctgtaacgccttgtttttcaagcgatgtgaggtctgataggccctgtttcccggaccgacccctgcccgcgtgccccacaggctcgccgtaggggtcgtttcgttatgtttcgttatgccgtcaattgaaaccttgtatgagtcagacgcttgagggatactgggtgcatgaagatttccgcagatttcaccgtcattcccgacgcgtttgccaaggcggcgccgcctgagaactgcatcgacggtacgccgattgtttctttccccttctacattgatgcgcttgatcccgcagtgcagttcctgcattgggaattcgttgatccggattcgattccggtatgcggtttccagtggaatcattggtccctcgcgaacctgcccgtggatgcgctgatgtacgatttcaacgattctcacgcgctcgcgattccggctgatttctcgcgcacggtttccgcgatgattcctgaaacgattcagggacgcacgtccgccgcctcgccgttgctgcagggccgcagcaacgatcccgcagtgacgatgcgctacaacggtccatatccgccagatcaggatcacgactactatctgcatgtgtggggtaccacggctcctctcgccggcctcaatcagggattctggctcaacgaaatggaacgtgcgctgcgtacttccggtacaatcgttgatcagggcgctattttcctcactggaaaagcctgatttgtgaaagagaatctcaagtaaggccagaaatttgatttccgcagcaatataacgatataaagatgtggaaatcagaaatatatccgacgaaaacgtattgacaataatcgaaaggattgctgaataattatggcgtgcaccacgattttggttggcaaagacgcaagttatgacggatcgaccatcatcgcccgtaatgaagatagtgcaaatggtgagttttgcccgaagcgcttcatcgtagtcaagcctgaagatcagccgcgcaagtacaagagcgtgctttcgcatgttgaaatcgatcttcctgacaatccgctgcagtatacggctgtgccgaatgccgatctgaaggaaggcatttggggcgaagctggcgtgaacgaggcgaacgttgccatgagcgccaccgaaacgctcaccaccaacgagcgtgtgcttggcgccgatccgttcgtggaacttacgccggccaaaggcaaggaaggcgaagagggctatgagccggaagtcgccggtggcattggcgaagaggatttccttactctcgtgctgccgtacgtcaccaccgcccgtgagggtgtggaacgtttgggcgctctgcttgaggagtatggcacgtatgagatgaacggcgttgccttctccgacgtcgacgagatctggtggctggaaaccgttggcggccatcattggatcgccaagcgtgtgccggacgaagcgtatgtgaccatgccgaaccagctgggcattgacgaatttgatcttgaagatgcgtttggcgagcaggaggaccacatgtgctccgccgatctggccgagttcatcgaacgcaaccatcttgacctgtcggtggagaattccactccgttcaacccgcgtgacgcgttcggctcccactccgattccgaccacgtgtacaacactccgcgtgcctggtacatgcagcgtttccttaacccgtacgacgagcagtgggatggtcaggatgccgatcataagccggtttccgacgatattccgtgggctcgccagccggaacgcaaaatcaccatcgaagatgtgaagtatgtgctgagctcccactatcagggcactccgtacgatccgtatggaaagcttggcgaccagcgcacccgccacatgttccgcccgatcggcatcaaccgtcagagccagcttgcggtgatgcagatccgcccgtaccgcccgcaggtgagccgtgcgatccagtggatcgcctatggttccaatccgttcaacacgctcgtgccgttcttcccgaacgtcaactccacgccgaagtatttggaagacaccaccacgcgcgtcacgtccgaaaacttctattgggagaaccgcatcatcgcggccctgtgcgattccagcttcgccgacaccgccaacgccgtggaacgctatcaggagaagaccggcgcgatgggccaccgcatggttgccgctaccgacgagcagatcgaacgtttggtgggtgacgtgaccgacgaattcgatgcggaagacgaaatcggcgatgttcagcctatggaaccggatgcaatcatcgaagccgtgcgcaacggcgaagcccgtgaaatccttgccgcagccaacgagaccatggccgcgcagctcaaggaggaaaccgacaagcttcttgattccgtgctgtacaccgccagcatgaacatgaagaacggcttccacatgtcggacttctaaaatctcactattcggctctcgtgaccacgttgcgggagccaattattttccgcaatacaacatcgttagaatgacgtgcattccaatttgaagaaaggaaccccagtgaccagcattgaggatttcaccagccagtacggcttggtgcagaagattgatgcgttcggctatctcgattatttgaagaatgatccggatgctccacgcaagcatggcaaggtcgtgctcgtcaccgccgatactccgctgaaggcgtctcgcggcgagggcaagaccaccaccacgatcgcgctgatcgacgcgttgcgtgagcgtggcattgatgcggccgcagtgctccgtcagccgagcatgggcattaccgctgccggttccaagggtggcgcttcgggcggcggcaaggcttccctgactcaccctgagctgatcgactggggtctgtgcggcgaaatgggcgctatcgaagcggcccagaacctgctggtttccttcgctgagaaggccatcgacgacggcaagctcgacgatatcgccgtgccgcgcgtttccgaagtgccgtcccgttcgctgcgtcagatcgcggtggaccgcggcaagggcaatgtggccgagcgtgtggtgctcactccgacctgcgagctcatgcagatcgtggtgctctcccgttccatggatgagatcgccgagcgcgttgccaagatgattgccggcacgaaggacggcaaggccgttacgttcggtgaattcgttgatttgtggcgtattaccggcattctttccgatgtggtgaagccggcgaagacggaaacggtgaacggctctccggtgtacgtgcacggcggcccgttcgctaacgtgtccatcggcattccgacgctggtttccgtggaaatggcgtgcgccctgcacgacgtggtgattgttgaggccggttatggtactgatgcgggcgctcagaagtggcttgacattgcttgccgcgagtatggcgcacagtggccgtccgccgcgattgtggtgacccgcgcttccacctggcgtgacgatccggcgcttgcctggcgttacccgttccacgtgcagcgtttggaaggtcttgatattcctacgttcccgctgattaacctgtgggatggcgaagacgatcaaattccggcgttgcagcagaccgccaaggatctggagttccgcgagccgattatcggcaacctgtatcgcgatggcggcgatgcgctcgccccgcagcttgacgcgttcgttgacgcggtggtgaatggttccatgccggccacgccgcacagccacaagggtatggctctggtggagaacgtgcgttgggttgccgaaaacgcgtacggtgtgccggcagatcgcgtgatcctgaaggacggttttgctgaatcgcttaataaggcggtggacctgtgcgccagcgccggtattgatttcggttcgcttgcactggttgcggtgaagtctccggccacgatgactgacaacgattccgctccggctgaagagcgtacggtgacgttgaagaaggttgaagtgcattccggtgccggtttggtgcatgtgaatctcaccgtttcgctgaccacgccgatgccgaagatcgtgtgataaacgagtcgtagcgttctgatcgcaacattttagggcggtcacttgcgtatatgcgtaggtgaccgcctttttgcaccttaatttcggcggtttctagcgaacgtcgcaacgccatgacctcgaaggaacggtagaaacttcgtcagaagttgccgccccgaaccgtgaggcggggaacacggtgtgtttccccgtaggtgaggtgagaggttcgcaatatgggcgaacctcgaaggaacggtggtaacttcgtcagaagttgccaccgttccagccccagtcggtggtggcggtgtagcggatgtacgtgcggtcggccggaatgcccagttccttctccaacgcggccatgatctgctcggtcagcttctcccaggcggaaccgggcacggaacgaccgaacacgttcacctcgacgtatgcggctggcttggaatcgtcaccgccgaaataaatcggcatattgtcttcaaacgggcacatcagccagccttcggacttgccaggaacggcggtgatcgccttgccgtatgcggacttcagcgcctctcgctgttcggcggtggtggacacggaaacatgagtgtggatgactggcatgatgctctccttaaattgttggaatcagcctttgcgtgttcacctccagtctagacgtcgaacggctcagacggggtggttgtgtgagaaatgttgggctttgcctgaacggctgccaaggtggtctgcgtgcgcgtgttaaatattcgttgtgagaaaactgattgaacagcttatgaaatttggcctcgttggcgtgatcgccttcattatcgactggggcattctgaatcttctcgtcggcgtgttccatatgcacaacgtgctcgccgcaaccatctcgttcattatttccctgattttcaactacattgccagcatgaaactggtgttcaagcaccgtgatgacatggcccgttggatggaaatcctcattttcgtggtcggcgcggtcatcggcctgttcatgaacgacgccattatctggatctccacgtatggcatgaaccatgatgcctacgtgtcgcagagcaccgaatacctgatccgcaccaacgtcggcaagctcatcgccaccgccgtggtgatggtgtggaatttcctgacgcgcaagtggctgctcgacgatacgcacaccaacgccatgaaccgtttgcgcaaagccgacaaccgcctcacgccggaagagctggaagccaagtggcagaacagcttctcgcacaggctcggtgtatggtcgctggagcacacccccaacggttggcccaagtagtactgaattcggaaaatctgtctgcacaacccggaaatctgccctgatcaaatctgccctgattcccgactcgcgcagacggccggacagtcctgaatatgaaaaggcggtgcttacacctataaaggtagaagcaccgccttttcatatgctctgcatgctttacgtgcgaaaggtcacacgcttacggtggtaagcatgggctgctcggtggagtccttgatctgcttgaagccgaacagggcgatcaccagcgaggtgagcgccagagccgtcactacaatgaaaccaccgtgtgatcccatacggtcgatgaactggccggcaatcgccgagccgacggaaccgccgattgagttcatcgcacccatccaggccatgccttcggtgaagcgtgtgggcggcaccaagtgcagcatcagctggttgccgttcacccacgtcggtgcctggcatacgccgatgaacaggtagatgatcatgatcacccacagatgtttggcgaacatgaacgagccgatgcctagatcgaccacggcaaggcagaagtagaaacgcttccacagcggaatagtccaattctttgcgccatacacgagcgcgccgatcagcgagctgaacgagaagcaggcgaacacgaaaccggtgtactgcttcatattcgcttccgtggcgaacgcgacgatcgaaatgccggcggccgactggaacgcgcccaaaccgaaccacgtcacgcatacggcgattaggcccggcccccaaatcgattccttgcgcccggcattcacatccgcggcggcctgatccatagcggcctgcacttccgcagccgttttgccttcggaacgtgcgcgatcgcgagcgtattcgactgccgcttcagcctgtaatgccttggaacgggcggcttcgcgctcgcggtattccttgcgggtcatgcccgcttcgcgagccagttgcgtctgcgatttcggctcggtggaaagctcagtgaggaacatgagcgcgccgaccaccacacacacgccagtgaatgagaatgccaacagcccggaaatcacggccagtgtggaggcgagcggattgccaatcacccacatgcattcgtcgaacacgccggaaagcgaaagcgcacggttcgttttctccgtatcgcctttaagcagcgtggtccaacgctgacggctcatcgcgccccatggcggaatcgccgccatgaacggtacgatacagaacagaatccacgacggcactcgggcggtgatgcaggaaaccagtgcggtcgccgcaatcatccacacgatgattgtcggaatcgacacctgacgctggccgaacttgtcaaccagcttgccgagcaccgggctcgcaacggccagcgcgatcgcctgcacggccgtcagcgcgcctgccagcgaataattgccgtaataatgctgcacggaaatcgtaatcgtcatgccgaccatcgggaacggcatgcatgcgatcactgaaccgaccgaaaatcgggcggtgtgcggtatgcgaagaagctccgcgtaccctccgaaaagatgttggccgatgcttttggcgccggcgaggactgaattggtcatgttttgccgctcctttctgctcacggttggtgcttgcgtccgctgcgttgcgttgccgcggaccgcttgatatacccttgttctgtcttgattgtttgctctccagccccagtctctcacttcaaccttgcttgaatgtcaatcgattgacgttcaagcgtgttgcatagggggtggagactggttgtgtgccattttcttgaactagacaactttatgcggaggtactgtcgcaacacgcggtgcattgaggttggcagacataattcgattggctattttgtaagtactcaccacacgttcacttggtggacgaaaagatgtccggcgggcgaaagacggttgttgcaaaatggttgcgcaacgcttccaaagcttgcgattgcagaattttcgttccatcggtcaacgtcagcagtccggcagcatcttgcggaaaggcggtagggatgcccgcaacaaccatccatttcgtacgtcacggcaaagtcgaaaatccagggcatttgctctacgaacgactgcccggattccacctgtcggaagtgggtgtgcgcatggcgcaggtgaccgcgcactacattgccgtcaatccacgactcaacacagtttccgccatctactcgtcgccgctggaacgcacgcgcgaaacggctggcgaaatcctcaccgcactcaacgaagtgcgtgaaacccgtggcgaggagccgctggaactcaccaccgacgagcgcatcatcgaagcgcgcaacgaattccgcggcacgcgcatcggctacggcgaaggcgcactctggaaaaacggcaactggaagctggtacgcaacctgtggaagccaagctggggtgaaagctaccagtcgatcgcgcatcgtgtgcaagcgttcgtcctcgaaaaagtgggggagcatcccggcgagcaaatcatcgtagtcagccatgaatcgcccatctggagctacaggcacatgctggaaaccgggcacccggaacataatatgctgctacgccatacggcactcgcctccatcacttccattacgtacgattgcgatacacgcaaagtattgtcgatcgcttacgtcgatcccgcggccgacgtgaaatagcgcataatgcggcatggaatcgccggattggaaacttttgaccgagacacgcgacaatgagtgcggcggttgttgaaagaacggggattccatgcaatcatggaagggctggatgctgttgggtccagtgaggaaaacaaaatgtcgaagctgcaaaggggcacgcatggctttcactatcaacaacggagcgctttatcaattattcgataggcctcatatgaaaattgccatcgaaagctgtgttggagtggtggaattatggccgctgcaaaccgttcaggagatggagaatgacgcaaagtacacggaagatctgcaagtaagattctcctgcaccatggcaagggcaatgctgcgattgtcccacgggattaacccgtccgtggcggaagccgtgtacgagggaatggacgagattccgggttgcgatccggaaattgtgcaagcgctcacgcgggccaatcaggcatacgatgtgatgcgcaattattccgaaaccaacaatgccgacctgttcttcgaagcggccgacattttgggcatcttcatcgacgcccatgtcgagacggaagtccgcaatatactgcaaaagatcgtggagtacattcggcagagcgtcagcctgggcttcgacggcggagcgctggaagatgtcaactactgctacgctttcaccacgaccccaaggacgctcaccgggcgattcctcgcggcgctcgcggtgggtgacggtctgatgaatctcatgtgcgaaggcattgacgatgtggacgaacagaccgtgcgcgtgctgccggtgatgctgtacatcaacgagttgtgcgagcagatggctgttccgccgatctatgtcggcgacgtgaccttgtctcgaatggttgcgctgcgtaatgctgtgcgtgaggcgggcagggcaacgccactcgaggagaattccttctgcgacaacacattcaccataaccgcggacaatgtcattccgtgcgcgggcatggagtgggatcatcatgcggagtgcctgcgttgggatccgaagagggccgagcaggaagccaaagatgaggatgaacgtaagagcaaggaagcgctcgctgaaaagttcaatttgatgacggacgctatgaaaagtatgagctacatggatgattccgatgattcgggtgattcaggcgaaggtgcggatgctgcgtgacgtgggcaatccgagataatccgaattagtgggaattatcgatataggaataagaaaatcccggcgcttgtgattgcggtgccgggattttctttatgtagtactgattattgcaagttcggttcttaagttcagtgctgaacctgcatatttcgtcaatgctgtatgttgccgtacacggtaggatcgtcggaatcgtcggaattgtcggatccgtacggggtctggccctgcgaatcgttgccgaacgtggggcgatcgaactgcgtctggtcaagctgggtggactgttccggaaccgtaggcagcggaggcatgctcggcatggaaggggcttcgggtgccggggctgcatgcggagttgccggggcggacggagtgtactgggcggctggagcggctggcatcgcaggtgccgcgtactgatcggtcggagttccgtaaggagcgccatacgggttgccgtacggagtgttggtggctgccggggctggggtcggagcgccatacgggtctgcggtgggcattgccggagtcggcgcaggcattgcaggtgccggagcggctgccgtatacggatcagcggttggcgtcggaacagccgctgcgtacgggtcggcgaccggtgccggagtgccgttcggggcgtattgtgcggttgcggtcggtggcatgcccggggctggggcgtagccgttgccggctgccggatcgtcgaagcgtgcgccggctggatcggtcttcttggccatgagcacaatgagcacgatcgacgtggccaggcatgcgatgaaaccgatgatcaacaggagtatgccggctgtgccagtcgagcttgatccgccaccgattacggaaatggcgccaagtcccgtcatgatgaggccgacgctcagcagaacgccaccgatgaagtcaatcgcgtagaggatgaccagcgtggtgccggccttgttggtgtcgtgcaggcggcgaacggaaagcgcaagggatggaacaatcgttgccagtgcccaaatggtgttgacgaagctttgcattccattggctgtattgctgtcgatgatggcgcccaacactgcgaagatgacggcaaacgcgatctggatgatgaatgtgcacagaacccaccaccagaattcgccgcgggaggcgcggcccttgaacgtggcgtactttttccagaagcggatgaacgcctcgccgatggtgcagttgtaggccggctggtcgagcggagcggtcagtgcgaagaagctgccggacccctgtggctgaggttgcggtgcgccgtattgcggctgctgctggttgtatccggccgcattgccgtattgcggtgcgctgtattgaggcgcgccatactggggtgcctgctggccgtagtcgggtgcgccgtattgcggtgcctgctggccgtaatcattctgaccgtaggagccgtaaccgccatattgctgggcctgctgcgggttctgcggattatattggttggggtccgtcattagattaccctttcggaaagtgaatcgacatcaaaaaagtgaagtcgattaacacaatactcttgcatcgccaaaaatactgaaaaatattgcagtgtgggacaatcccgacggaccccgcaaaaatcccctctgacttgggttatcttctgacgcgttggggaagttcgtcgatggcgcggctcatgcccagcatggtgttgtaaggattggtggctgcgatcatcgggtcaattagctgcaggatgttcatgaccgcgaaaagcgagttggtgcgtgggactgggtggcacgtccggtttgcggggcacaatggagcttatgactgaagctgaaaacaccaaaccagaacttcctgagcatgttcgcgtgcgtttctgcccgtccccgaccggcattccgcacgtcggcatggtccgcaccgcactgttcaactgggctgaggcccgccataccaagggcacgttcgtgttccgtattgaagatacggacgcccagcgcgactccgaggaaagctacaaccagatcatcgaagccctgaattggctgggcatcgactgggacgagggcatcaacgtgggtggccccgacggcccgtaccgccagtccgagcgtggcgacatctacaaggatgtcgcagccaagctgcttgaagccggctatgcatacgaatccttctccactccggaagaaatcgaagcccgcaacgtggccgccggccgcccgaaggctttcggttacgacggctacgaccgtgatctcaccgaagagcagaaggccgccttccgtgccgaaggccgcaagcccgccctgcgtatccgcatgcccgatgaggatgtcgcgttcgacgatctgatccgtggccgcatcgagttcaaggctggttccgtgccggattacgtgatcgtgcgcccgaacggcgatccgctgtacacgttgaccaacccggtcgacgacgccatgatgaacatcaacgtggtgctgcgcggcgaggacctgctgagctccaccccgcgtcagatcgtgctctaccgttacctgatcgagctgggcgtggccaaggaaatgccgctgttcggccacatgccgtacgtgatgggccagggcaacaagaagctttccaagcgtgacccggaatccaatctgttcctgcatcgcgacaacggtttcattcgcgaaggcctgctgaactacctggcgctgctgggttggtccatcgccgccgaccgcgacgtgttctccatggaagaaatgatcgaaaagttcgacgtgcgtgacgtcaaggccaatccggcccgtttcgacctcgacaaggccatttccatcaacgccgagcacatccgtatgcttgagccgcaggacttcctgaaccgtgccgtgccgtacctgaaccgcgatggcgtggtctccgccgattcctgggatgcgctgaccgatcgcgagcgtgaggtgctgtccgcttccgtggagctcgtgcagccgcgcgtgcgcctgctgggcgaggtcgccggcatggtgggctcgctgctctccaccgagggctacatcgagcctgatgatgacgccaagaagcagttgaaggatcccgctccggcagtgctcgacgccgccattgcggcgctttccgacgttgctgaagatgattggaagaccgacttcctgcatgagacactgaacaagtcgctgatcgaagatggcggttacaagccgcgtctggcgttcggtccggtgcgtgtggccatgagcggccgtcgcgtgtctccgccgctgttcgaatccatggagatcgttggcaaggagatcaccgtcgcacgcttgcagggcttgcgcgagcacctgtgatgcgctgatggtgtgattttgccgatcgcatgactgtcgacccgctggaatgttccgttccagcgggtttgttgttctgggatgctgtttaagaatggcggaaaatggcgcgacacgccgtgacttgcgtactcctacggattcgcgtatatttatcactcgttgcggttcacggctcagctgcgaatcacagcaataactcaagcccccgtcgtctagcggtctaggactacgccctctcacggcgccaacaccggttcaaatccggtcgggggtacgacggacaacttttcgaagttgccacgcctgccaaattgggatgtggtgtaattggcaacacagctgattctggttcagccattcttggttcgagtccaggcatcccagccaatgaccctcgcagatgcgagggttttttgtttttcgcaagcatgtctgccagtacaacatagtccaagaaaattgcactaccctaggaagcatgactgaattgcagaacgcagcaaaagccgccgccacgagaccgcgcatccaaccggcggaagaaggcgacgatcgcccgctttccgtatccgcgcgactgggacgattgcaattccaccaatccggcaaattccgcgttctgcagcttgccgacattcaagacgggccgaaagtcagcaaagacaccgtcaaactcatcgaagcgtcactggatgccacaaggccggatatcgtcatcttcaccggcaatcagatcgcaggatatgatcccgcatacgcgcaaaccacgcgcaaacgtcgttggagcgctgccgcggggatttcctccaaaaccgcttcatccaagtcttccgaagcgtcagaacggttcgaagctgcgctggaacgcacctgcgcatccgtgcgcgccactgtcgaacagctcgtgcgtccgcttgccgatcgcggcattccgtgggcggtgacattcggcaaccacgattttcaatgcgggctcagcaatgcggaaatcgaaagcatttgcagggaatttcccggatgcgtgaaccctgagcctacgggaggcgagagcggcctcgggggtgcaaattctgtgggaagcatggattctgcggaagatgcaggtttcgtgcaactccgggcggaatcgtatttgccgaatcagcgcgtattcgcttgcgagccgggcaccttcgcattgccggttgccgatgtggaccatacgatgtccgtgctgggcttggtattgctggattcaggcgattacgcacgttccggcgggtacggaagcccgtccgcggaggcgttgcgatttcttgccgaagtgccgaaagcgatgcgtgcgcaatcgcaggaaattgggcgatcgcaggaaccggcggtcccgtgcatggtattccagcattttccggtgcaacagtattaccaactgcttaagccggccgcggcgaatgcggcgcgtgcgattgaaggctaccgcaatttcgctggaaaacattacgttttggatgagggaaaaacgcttcccggcagttatctgggggagggtgtcagctgcccggatgccgacagcggtgaattcgcgatattggaacagcatgactattttgcgatttccgcgggacatgatcaccgcaacgcattcgttggaacagtgccggtttcgcgagaaatggcctcggctgatgcgcagacggcggcttcgccaggcaaggttggcggtctgatgatgatcgcgtcgcccaccagcggtttcggatcttatggtccggtgccgcagaagcgggccgcgcggctgatcgagttcgacatccgccatccgtacgagccgcgtacgcagctgcttgaatacggcgaattggtgggcaaaccgagcgcgggcaaggcgtacgcgtacggcatgaccagtgaatcgaagcccgaatccgaaggcgtggatctgctgcatcggccgacatggtggagcaaactgttgacttggctgcgtaagaagtagctgaaaagagcgaaacgacaaatcctgcaaggaaatggcaaaacttgcggaaggcaggaaatggcaaaaccgtgtcctgcatgcatcgcggaacacggttgagaggctgtatattgcccgtcagcgaccggaagaagccttaatcaaggcgtcggtcaaatacttgccggcagccataaccagcggggcgtaacggcgtccgggattggaccccatacgaccgtccgggccggaaatcgaaattgcggcaatcacctgaccggaagcattgcgaatcggcgcggaaatcgagcatacgccttcatcgcgctcgttgaccgactcggcccaaccgcgcttgcgcacggcggtaagcttggccgcggtgaacttggcgtgacgcaacccctgatgcaggcgttcggaatcctcccaagccagcaaaatctgggccgcggaaccggcctccatcgacagcatcgcaccaaccggaatggaatcacgcaaaccggaagcgcgctccacggcggcgatgcacacgcgcatatcgccctgacggcggtaaatctgcgcggattcgccagtgcgatccagcaacgtctgcaaaatcggcgcggctgcggtcagcaaacgatcctcgccggcagcagcggccaattccgcaaaacgcgagccaagcacgaaacgaccatgctgatcacgcaacacaaaacggtgacgctccaacgcaatcgccagtcgatgcgcggtcggtcgggccaagcccgtcgaggaaaccagctgtccgagcgttgccggaccggattcaagcgcgtcaaggattttgacggtcttgtcaagcacacccacaccggaatgaatctcattgctttgagaagacgtcgtgtggtgggtctcagctggaagctcagtctcatccgactgcgattcaggcatggtggtgcttgtattcgaagaagtcataagagggattatgccatctcacatattgaaatgcaaaatgtacgcaatgtcggactgcggtagagcaggtattttaatctttactcagttatgaaaaaagctggaaaaaatctgaattttcaacgattttgtaggtacatacggggaggtatgccacaatcgcggcgattttgacatggtctggagtgaacttggcccatatgtgatgtgtgcgttgcatgcaagtatctcatataccggcataaacgcgttcgaaccaggctcgaacaccataggcttatagcacgaacaacgcgggttggcaataccgcgaggaaaaagcgaggaaaaattcgaggaggtcccgcaatgggaacgacattggccgagaaggtctgggccgatcatttggtacgcaagggtagtgatggggctcccgacttgctgtacattgatctgatgctcatgcacgaagttaccagtccgcaggcattcgaaggcttgcgactggccggacgcaagccacgtcaccttgaccagctgatcgcaacggaagatcacaacacgccgactgccgacatcgaccgcccgaatccggataagatctccgcgctgcagctaagcacgctcgaaaagaactgcaaggatttcggcgtacgtctgtgcccgctgggagacgccgatcagggcgtggtgcacgcgttcgcgccggtgctgggcctgacgcagccgggcatgacgatcgtgtgcggtgactcgcacacctccacgcacggcgcgttcggtgccatggccatcggcatcggcacctccgaagtcgaacatgttatggcaacgcagaccctgagcctgaggccgttcaagaccatggccgtgaatatcgaaggtgaactgccgaagggcgtcaccgcaaaagacattattcttgcgattatcgcgaagatcggcaccggtggcggccaagggcacgtcattgaatatcgtggtgaggccatcaagaaactgtcgatggacgcacgcatgaccatctgcaacatgtcgatcgaagcgggcgctcgcgccggcatgatcgcgccggacgaagtgacgttcgaatatctgaagggacgcccgcacgcgccggaaggtgaaatgtgggacaaggccatcgaatactggaagacgctgaaaaccgatgacgacgccgtattcgacaaggaagtgaccatcaaggccgaagatctcgagccgtatgtgacgtggggcaccaacccgggtcagggcatcaagatttccggcgtggtgccggatccggcttcgttcaacgatgaaaccgagcgcaccgcggccgagcgtgccattgcctacatgggcttgacgccgggcatgcgcatcaaagacattgccgtggataccgtgttcatcggctcctgcaccaacggacgtctcgaggatctgcgtgtggccgcttccattatgaaggggcatcacaaggccgaaaacattcaccgcgtgctcgtggtgccggcctcctctcgcgtgcgtttgcaggcggaaaaggaaggacttgacaagatcttcaaggacttcggtgccgaatggcgtaacgcaggctgctccatgtgcctgggcatgaaccccgacaagatggtggcccgcgaacgttccatctccacttcgaaccgcaatttcgaaggtcgacagggcaaggggtcgcgtacgcatctggcgtcgccggcggtcgccgccgcaacggccatccgcggtaccatctcgtctccggctgatctgtgaatcgttgagaatgcttgaaaacctgagaaatcttggatttccggcattctgtgaatcgttacatcgaaagaaatagtgaaatggaaaaactgactactcttaccggcgtggccgtgccgcttcgccgttccaatgtcgatactgaccagattattccagccgtgttcttgaagcgcgtgcagaagtccggtttcgacgacgcgctgttctatgcgtggcgtcgcgatccggaattcgtgctcaaccagccggaatacaagcggggcaagattctcgttgccggaccggatttcggtatcggatcttctcgtgaacatgccgtgtgggcattgcatgattacggcttccgcgtggtgatttcatctcgtttcgccgacattttctacggcaacaccgcgaagaacggcgtgctggctgcgattatgccgcaggaatccgttgagctgctgtggaagctgcttgacgaggagccgggccgtgatatgacggtgagcctggaggatcgcacggtgacgtgcggcgacgtgacgctgccgttcgaagtgaacgactatacccgttggcgcctgatgaacggctatgacgatatcgatctgacgttgcagtatgaagacgatattgtgacatacgagaagatgcgtgccgaaaagttcccgttcaagccgaagacgctgccggcgaagcgtgagccggagcagttgatcgcgtccgcgcgcgaaggcgaatacccggattggcagggcccgcttgccgatcgcggcatcatctgagttggcggctggctaggtgcgcgggctgtttgcggggtgattcctccagtgggtggaaggaacaccccgcttgcgttgttgcgcgggctgtttgcgggaggatttttccagtgactggaaggattgggacgttgggattgctgattatgtgagatttgcgcgggttttgcatatgagacgcgctatggtgggcttattgtttcgtgctttcgtagctttcggagagaaaaatgagccagggttttgcgccgttttatgatgtcaatcgcacgtatgaagacaactatttgcaagggccgttcggcgcgtttgccgaagtgttgcgggctgatgcgtccgattctgcgggatcggtcacgtctgttgttgctgaggttgcgtccgattcctccagtgaggttcagggcgttcagaccattcaggccgctcaagcgcaggaattccttggttttcgtgtgaatctgccgttcggtattccagctggtccgctgctgaatgagcgtttcaccacggccgctttccgtatgggcttcgatctggcggtatacaagacggttcgttcccgcgcatggggctgcaatgcgttcccgaacgtgctggccgtgcatccgcggaatgccgatggttcgctggttccgggcagtgccgaacttgacgagggtgtgcttgccgatacccgttatgagcttccgatttcgatttccaacagtttcggcgttccctcccgtgatcccgacgaatggcagccggacatgcagaaggcgatcgccgcagccggtgacggccagctgctggtgccgagcttccaaggctcccgcgtggagggcatggatcgtgaagcgtatatcgccgatcatgtcaccacctcgcatttggttgccgaaactggcgctggcctgatggaaatgaacaccagctgcccgaatgagggacataatcgtctgttgtgccacgatccgcatttggtcggcgagattacggaagcggtgaagaacgaaatcggcgatcgtccgctgatcgtgaagctcgcatacattccgaatgatgccgatctggaaatcatggtgaaggaaaccgccggccatggcgcggtgcagggtttctccaccattaacacaatctccgcgaagctggtggatgcgaacggcaatcaggcattgccaggcgcggggcgtgaccgttcgggcgtatgtggcaatgcgattcgtggtgcaggtctcgatatggttggccgcctgaatgcgattcgcgagaagctgggtcttgattttgcgatcgttggcgtgggcggtgtgattcgtccggaagattacaaggcgtaccgcgaggctggtgcaaacgcggtgatgagcgctacgggtgccatgtggaacgcccgtttggcgcaagacattaaagccgcactgtagtcacaggttcaattgcgcctgatttgcgctctgttgcgtttcaccgtccttttttcccattcgctggaaggattagtgcagcacgggggtagctgtccgtcctgattcttccagtgactggagggttttgcccgctgagatgcagtttggtgggatgattcttccagtgactggaggtttttggacggtggaggggcttgtatcgggaggattcttccaccgactggaagtttttgcccgctgggatgcggtttggcgggtggattgttccagtggctgggaattttggtcgaaagtcgaacgaaattgggagacactgcgctgaacgcggcatttcacgagcccactacatgccttatggcaaactgagggttagtgtgtttcaagcttgaaccgtataagggaagcgaaagaggttgagcgtgtctgacaacaacaacgacattctgcacgtcgaaggtggcaagccgctgaacggcaccatcaaggtgcgtggcgcgaagaacttcgtgagcaaggccatggtggcggcgctgctcgccccgggtacgtccgtgttgaagaatgttccggagattcgcgacgtgcatgtggtctccgacttgctgcgtctgcatggcgtggacgttacggtggatggcgatcgcggcgtggtcacgatcgacgccacgaatgtgcagcttgccgatgtggccgacgtggatacgctgtctggttcgtcgcgtattccgattctgttctccggcccgctgctgcaccgtttgggtgaggcgttcattccggctctcggcggatgcaatattggcggtcgtccgattgatttccacctggaaacgttgcgcaagttgggtgccaacgtcgataaggaacataaggacggcattcatatcaccgctccgaacggtttgcatggcgcgaagattcacctgccgtacccgtcggtgggcgctaccgagcagacgttgcttgccgccgtgcttgctgagggcaagacggagctttccggcgctgccaccgaacctgaaatcatggatttggtgtgcgtgctgcagaagatgggcgcgatcatttccgtggatgtggatcgtacgttccgcatcgaaggcgtgaaggaactgaagggttacacgcacacttcgctgaccgaccgcatcgaggccgcttcctgggcttccgcggcattggccacgcatggcgacattttcgtcaagggtgctacgcagcctgaaatgatgacgttcctgaacgtgttccgcaagattggtggtgagttcgacattaccgataacggcattcgtttctggcatccgggcggcgatttgaagccggtcgcgatcgaaaccgacgtgcatccgggcttcatgactgactggcagcagccgctggtggtggcgttgacgcaggcgaagggcctgtcgatcgtgcatgaaacggtgtatgagaatcgtttcggtttcacgaagccactggtgcagatgggtgccacgattcagctgtatcgcgaatgcctcggatcgctgccatgccgtttccagcagcgcaattacaagcattccgcggttattttcggaccgaccccgctgaccggccgcgatattgacgtgccggatctgcgtggcggcttcagccatctgattgccgcgttggcggcaaagggcccgtccaatgtgcagggcatttcgctgattgaccgcggttatgccgatttccgtggcaagctcgaagctctcggcgcagatttcgactgatttgttgcttgatttatcactgatatagcttgattggcttggtaaggccggtgttcacaacagtgggcaccggctttttgcttacatattgccgttgctcgttctcaaaaacttagtaattcagtgtataaattattgaacttaatttagggggttatggcgcataatagtgatgcaaaaagttttattgtttttgaaaataatgtcgattttcggcagagattctttcggaatggcattatgattgtcgatatcgaatggcgtttgcaacgaggtgaacagccgaagatataagggtttccctcatcgttattgtgtttactgcatgtccagacggattctagggatagtcgcaacatcttcgtcgtcaatcgtcctccagcctatccaccagttccgcctttttcgtatattccgtgtttttgtatttcgtgtgtgcgtcgtgcatgagcgcaatcgttccaaccaagcggaatgggtggtggcagaatggaacgcatggcatccaaaggaaaaccctcgccgcgttccgcggtcaaaccgttaagcgacgaacaagtcgcaaagctcgcacagcgtcaccatctcgttgacccaacccacgactttccatgcgggccgcgcaaagccaatgaagccgaaatcgcgacgcagaatccgaaagcgacccatcgtctgctcaccggatgcgacatcgtattccgcaaccgcaccaaactcaaggcgtggggcatcgaacacgtgccggaaaccggtccgttcatcaccgcggccacgcacgtcaccatgtttgacgtgttcgtgcccatgatctccatgttccatcaaggccgccgtccgcgctacatggccaaagccgaaatggcctcgtggccgctgatcggcaaatggttccaactggtaggcatgcagcccgtgcaacgccgttcgggcaaggcgaaagccatcgaggaaacctctgtggaaatccttacctccggccgacccctaaccgtatggccggaaggcacggtaacgcgcgatccgcagaaatggccgatgagcatgaaaaacggcgtgggcatgatcgcgcttgaggcttcgcgccgactcggctaccagattccgctgtattgcgcggtaacgtggggcgcggcaagcatcaaccattggtggccgtggccgcgtaaaaacgtggtcatgtgctacgacgaggcgcttgattatgcggatctgctcgccgattgcgattcctggggtgaggaagtgccggaggatctcgccaacgaacttacccgacgcatccgcgtgcgcatgaccgaagtcatggccgaaatccgcggcgaacaagcccccgatggatattgggattatcgtacgatgagccgagtgaaggactgaatcgaagaaggccgaatcgaaaaagaccgcacacgcgattgctgaaatgcggtaatcgaaatactgccagccgattgcgcatacgtatggcgcgtattgcggcatatatcgcggtgtgcgtagccggcggtagcataggaaaagcaatttttgagccaagactccgggttatgaatgatgcccggagtaatgcaaggagcaaatatgacgaacgtgacggtactgggcgcaggagcttggggaaccgctttcggtcaggtgcttgccgatgcaggcaacaatgtgactatgtgggccatcgaaccggagattgtggaaggcattcgcgaccaccatcacaacggtgttcgcctgcccagcgtgaaagtgctgccaagcaacatgaccgccaccggcgaccgtgccgaagccgtagccaacgccgacattgtgatcgtggccatcgccgcacagttcgcccgcgtcgcgctcgtcgaattcaaggacctgattcccgaaaccgcactcgtcgcctcgctgatgaaaggcatcgaacgcgccaccggcaagcgcatggatgaagtcgttatggaaacgctcgacctgccggccgaccgcttcgccgcgatttccggaccgaacctgagcaagcagatcgccgaccgcgagccggccgcaaccgtggtcgcctgcgaaaatctcgacaatgcgcgcaagatcgcagccgcttgcaccaccgactatttccgtgcgttcgtaacccgcgacgtgatcggcttggaaatgtgtggatcgctgaagaatgtggtcgcgctggccgtgggcatggcctgcggcgccggctatggcgaaaataccgccgccatgatcgaaacccgtggcctggccgaactgaccgccctgggcgaggcggcaggcgccgatccgaagacgttcgccggtttggctggcgtgggcgacctgatcgccacctgcggatccccgttgagccgcaactacacgttcggatccaacttgggcaagggattgagcgttgaggaagccaccaaggtgagcaacggcgtggccgaaggcgtaccgaccaccgatgcggtggtggcgctcggcaagcagtatggcgtgcctacacctctcgccacggccatgagccacgtgctttccgatggcatctcctgcgcgcagatgctgtccgaacttttcggcgaaggcatcagcgaagaataagctttccgcaacatcgcgattgcagataagaccgcactttcaggtgcggtctttttatttttcgaggcatgcgattgcgtaaaacgtcaatcggaatgtgtcaatcgtcaatcgccatatatttcggcaataatagtaaatctgtataaaaatagtctaatcgtgattagtctaatcgtgattagacaaagcgattaagctcggtttttcaggttgcaatcgcatcattccaacgtttgattccgtattctatgattcatgaaaataggacatgagtgacgggcgtgtgtaattatgattcgtcgtgtgtgggctgtggggtgcggtttgtatactgaactgcgatattgcgaatgcgtggtatcgcgggcgaacagaagtgcgaaccggcgcgatattgcgaagacagacagtacagacagtattggcagacggtattgggcgcgcgtgcgttcaacggaccaacttatggagcataagacaaagatggcaaaacagcgcattgtggtgatgtatggcggcaaagccgacgagcattcgatttcctgcatctctgcggcgggcgtgctgcgcgcgttggatactgacaagttcgaagccattgaggtgggaatcaccaagaacggcgagtggatcgtaggcggcgaggatccacgcaagtggaacatgagcgaaggcctgccgatggtggagaagacggattcctccaaagatgtggtgctggatgtggcactcggccaggatggtttcttcgctcgtgaagatgacggcacgctgacttcgcttggccacgtggacgccgtgcttccggtattgcatggtccgtacggtgaggatggcacgattcagggcctgttcgaaatgatgaacgtgccgtacgttggctgcggtgtgctcgcttccgccgcttgcatggacaagcattatacgaaggtattgctggctgcggccggtattcccgtggctcccggcatcacgttggatgtgcgcgattatgatgccgcttccgaattcgccgccgaagcggacgagatgcttgccgcggtgcagcaggccggattgcagtacccgctgttcgtgaagccgtcccgcgccggttccagcttcggcgtgaccaaggtcgaacatgagggcgatgcggccgagcttgccgccgcagtgttcgaagcgtcccaccatgattggcgtgtgctcgtggaacagggcatcgacgcgcgcgaaatcgaatgcgccgtgctctgcccgaaggccggcgaggctccgcaggccagctggccgggcgaaatcgtgcttgacaagcgtgccgagggcgacgaccagttctatgatttcgacagcaagtacgtgaactccgacgcaagccatgtggaagtgcccgcaagcctgccggaagaaactctgaaccgcgtgcgcgaaaccgccaaaaaagcgttcatcgcagtcgacggcgccggcctgagtcgtgtcgacaccttcgtgacggccgacggcgaagtgatggtcaacgaaatcaacaccatgccgggcttcaccccgatttccatgtatcccaaggcatgggaggcaaccggcgtgagctacaccgatctgatcaccacgctgatcgagggcgtgctgcgctgatttcgattgggtggttgctcgctttagtctgattcgatttgcatgagactggcatcaatgctgacactgcgttggtgccagttgacatattccgccaatttacctgcagtttgggaaaatttagttttttcgattcaaaataaactgcatatttactgtaaggccagtatcgcgttgatttgagggcttatcttctttcttgttgttatgaacaaggcataagaaagatattgatttccatgatttctctgcgcaaactggctgccggctctcttgctgccgttctggctttctccatggccgcctgcggatcgggcagcacggattcctccgctgattccacttccggcaaggccgtgaagattgatgaaaagtccgcaaaggccacttccttggctgatttcggtacgatggacgatttggttgccgccgccgaaaaggaaggccagcttaacgtcatcgcacttcctcacaactggtccaactatggtgaggtcatcaacggcttcaagaagaagtatccgaacattaagatcaacgagctgaacccgaacgcctcctccaaggaagaagtggacgcagccaagactaacaagggcaccgacgctgcccccgacgtgttcgacctcggcttggccgtggcttccaccagcaccgacaacttcgcctcctacaaggtgcaggcctgggataagattccggattctgtgaagaatgctgacggcaagtattacgccgactacaccggcatcatgtcgatcggttggaacgccgacaagtacggcgacatcaacagccttgacgatctgatggatccgaagttcgccggcaccgtggcgctgaacggcaagcctgccgaagccggcgccgcattcaacggttacctcatgatcaaccagctcgcaggtggtgacatcaacgacttgcagccgggcctcgactacttcaagaagctcaaggatgctggcaacctcaccaccgttgacgtgaccgacggaaccatcgattccggccagaccggcgtggtgatggactggagctacaaccaggcctcctatcagaagagcctcaaggagaagggcgtgaactggaagttcaagaccttcaagaacgcccaggtggtcagctactacaaccaggccatcaacgtggacgctccgcacccggccgcagcacgcctgtgggaggaatacttgtacaccgccgatgctcagaacgaatggttcaagggcggcgccaatccggtgctcctcaactccatgaaggaagacggcacggttgaccaggacaccctgaagaccgccatcaccatcgagggcgatccggtgacctataccaacgatgattccactcgcatcaccgaatggctccagaacaactgggacaagaccatcggcaactgattggcaaccgctcgcaagcaacgcaaacgagctggatcgcaatcgaaaataatgcaatctaaggccggtagaccggcggacacgacgggctgaagcaagttccccgacgtcttctgccgcaacaaccggccttgaagcatgtctccagcgcaatagcggaatcccacaatcctatgcaatctcaccgcatatcaatcgtatgaaagcacgcatgcaaccatgactgcagcaatcacccccaaagcgggagtcatcggcgggcgtaacgcacgcgaagcccgcggaactcgaggaaacggcccctccgcaacctccgatttcgccacgcatcgccgcgaaatcggtacattcgtcgtgaccatcccgttcttcgcctacaccgcctgtttcctgcttgcgcctaccgttatcgtgattgtcggcgcattccagaacgtcgacggcggatttaccctcaacaacttcagtaaactcttcgaagcgaacaccatcgccgcgttcgccacctccattctcgtttccgtgatctccgcactcattggcgcggtcgtgggtgcggttgcctcgtatgcgctggtgattggcggcaaaccgaacagactgctgcgccgcatggtcagtgccatttcgtcggtgctcgcacagttcggcggcgtgatgctcgctttcgccttcatcgccaccatcggtatcaacggcgtcggcaccatgctgatccgtcagctgaccggactgaccgtcaatccgaactggttgagctccctgcctggcctaatcacggtctactgctacttccagattccgttgatgattatcatcttcctgcctgcggtcgattcgattcgtccgcagtggcgtgaggcttgcgaatcgctcggcggtaacacattccagtattggacgcgcgttgcggggccgatactggttccgcgtttcatttccgcattgctgttgctgttcgccagcgcgttctccgcatatgcgacggccgccgcattgttctcacagcgttcgattctggtgccgcttatgattcagggtgccatgcgcaacgaaatggatccgaatcagcagggattcgcgcaagtgctcgccttcgcgatgatcatcgtggttgctctggtgatgatgctgagccacgctgtggaaaagaaggccggacaatggcagtgaatcatactgaagcaatgcccccgcagctgcgtgccgcccgcgtgcgcaagcagcgcgtgatcaaggcgattattctcacgttcacgctgctgttcctgttcgtgccactggtgtctatgtttgtgttcaccattcgacacccgctttccggcaagtggagtttggatccgtggattgcgattttcaccggcgatggcagcgcgcttggtgctgacttgtccacattgtggagcggtcttggatcgtccatgggattgtgtgtggtgactgtggtcatcatgctgctgctcatggtacccaccatggtgatcgtgcacattcgctccaagcagctggaacgcgccatcgaatgggtggccaccctgccgctgaccatccccgccatcgtgctcgtagtcggcctggggccgatttaccgttggctcagcgccgacgtgctcagcaccaacccgatctggctgtgcttcgcgtacgttattctggtgatgccatttgcattccgcgcgctcgctgtgggcctcaactccattgacgtgaaaacgctgtgcgaagcatcccgctcgctcggagcctcctggccgcgagtgttcttccgtgtgctcatccccaacctgtggcagtcgatcctctctgcatcgttcatctccatcgccgtggtgctgggcgaatacaccgtcgcatcgctgcttggacgcatgaacctgcaggtggcgctctaccagcttggccaatccaactcccaaatctccaccgccatgtcgctgctggcactactgttcggcgtgatcctgctggtagccctcgatcttatttccgacgcactgcgtaaatccaaagaaagcaacgaatcatgactctcgctgatcagaaagcaaccatcgcacgcacttcggaagcgttcgtaaacgccaatccgagcgccgaaaccgtaacccgagccgcacgcgaagtcctcaacgactccgcggaacgcggcggcggcgtgcaaatgcttaatgtagacaaaatctacccaggagccaccaacaaggcgctcgacaacttcaacctagaaatcaatcctggtgaaatggtcgtgctgctcggcggctccggctgcggcaaatccaccgcgctgcgttccctcgcaggcttggaagacatccaggccggccgtattctcgtcggcggccaagatgtgactggcgtgcccgtcaacaagcgaaacatggccatggtgttccaggcgtactcgctgttcccacacatgaccgctctgcagaacgtggaattcgggttggaaatccgcggcatgggcaagacggaacgccgtaagcaggccatggagaagctggaactcgtaggtcttgccgatcaggctggcaaatacacgcagcagatgtctggcggtcagcagcagcgtgtggcgctcgcccgcgcactggccgtgaacccccgagtgctcctgctcgacgagccgctttccgcacttgacgccaaagttcgtgtgcagctgcgcgacgaaatccgccgcatccagctcgaagccggcaccaccaccgtgttcgtgacccacgatcaggaagaagcgctcaccgttgccgaccgcatcggcgtgatgaaccacggatgtatcgaacagatcgccgacccgcagacactgtaccgccgtccgggcagcgaatacgtggccacctttattggcctgaccaaccgactcccaggcatcacgaatggtgaggaagccgtggtgtttggccagcgcgtgccgttgctcgaagcctccaagcgcgacgcctccaccgtgctcgtgcgaccggaaaaccttgtgatcactctagccgcaaacgatggcaacatgataggcgagcatggtcgcgtcgacatggtgcacttcctcggtgcgctcgcccgcgttgacttgacggttgccgcaggtgtgggccacctgcccgtcaccgtgcagctgccggccactgagcttcctgccggcctgacggttggatccgaagtggtggtggctccgcgtccgatcgccgcgctcgccgtgtgagctgtctcgttgcggacgcccatgacgacggtcatgagattgtaagctgatattcagcattcctgtactaaggtgctgaatatcagcattttcgtatatgcaccccgtgcacgtcgtcgcaaaggcaaatatgacgtttccgcagtacccccaatatccgcagcggccgcaacaaccgcatccgcagcagaatccacaacagccatcccaatatcagcaacaaccgcagtatccgcagccacaagccaatccctacgaactgtggctcaggcgcgtgaaaagcgtgttctcccgcatcggcgcaggcatgtgcctgatggtggtgatctggtatgcgcttgcaacggtgctttccggcatgctctatcaggtactgcacaccacgaatctgccgaattgggcggtgtatgtggcatcggatacccctttgtatctcgtggccatgccgctcgcggtactgattatgggcaaatcgtcggtcattgaaacacgcaagttcgacatgaagccgggccaattcttcaaactgctggtcatgtgcttcccgctcatgtatgtgggcagtctcatcggcaatatgctggcgtcgctgctttccggaggcaacgccagcaattcggtaagtgatctggccatgcaattcgacgtgtggaacgtggtgttcctcgtgattctcggaccgttgttcgaagaatggatcttccgcaaggaactcatcagccgcacgcgcaaatacggcgaaaaaaccgcgatcgtgttctccgcgctgttctttggcctggtgcacatgaacctgttccagttcttctacgcattcgcattgggtcttgtgttcggctacgtgtacgtgcgtaccagcaaactgcgttattcggtggtcatgcacatgttcgtcaacttcatgggcggcgtggccgcgccgtgggtggtgacgaacattgacatcgacagtctgatgaacgtgctgaccagtgcggaaaacggcgacggaacggccatgatgcagtggatgggccagaatgcgacgggaatgatgatattcggcatctatatgctgctatattacggtctgatcatcgcgggcatagtgttgcttatccgcaatcgcaagaactttgaattctataccgcaccggaagaactgcctcgcggcgttcgcacgagcacggcaatactgaacgtcggtgtagttacttacattgtagtgacggttattattacgtcaatcaatctaatgatgtaataatttcagtataaaaaagtgccgcatgtggactactgcatgcggcactttatatatatgggtcaaccgcgatttcttatgttcgcgaggatattacgattctttgttaatggcgcgattctcaagaaaatcagcattggcgatggaacgtgccacggcgttgatcatgtcgggaagcgacgatcccggcttggcgtacgcgcacacttcgacattgatgccgtaaggggagtagccggtcagtcttactttcggagggaagcgcggatcggccaaatcggcggtatcgcgctgcacggcctgaaccacctgacgggtcatctcgtcgatgtcggtgccggccttggcggtgaacggcacgcgaaccagcatctcattggacggattgagtttttccagtgacgtggtgttcaggatcgaattcggaataatcttgacgttgccattgcgctcgcgcaccacggtctgacgccagttgatgtcttcgaccacgccgtcggtgcccgccacattcaccagatcgcccggctggattacacggccaagcatcagaccgaaaccgccgatgatgttcgcgatcgtatctttcataccgagtgacaccgcaaggccgccaataccgagcgcggtgaaaatcgtggtcggattaatgccgaacaccggctgcagtacagtgcccacagccaacgcccacaccaccacacgcagaatattgatgaaaatcgaagcgttcggcacttgcgaacggtccagcactttgctcacgattcgggtaagcgccttgtcgataacggccgcaagcagtgcaacgacaatgagcagaatgatttttccggaattggttttcagccaatccacaacgattccaatcggttccatagtgttctgaagcgtcccttcataagtttgattcgcatgcattactggtgcgcgcgacttgcgttcgctgcgtctgcgatgcgtgttcgcaacttgtgttcgcacatatcctacagtgcgtggctgagtcggtttgagcgtgggtgtgcgggggcgtgcgcgagaacatgtgggaatgcgcgtggtgacatgtgtccggagccgtgaacggactaaagttgaggcatgggcaatgttgtggattatgtgcgccgcgagttccgcgggtttggcgaattggcgttcagcaatgtcgattccttggtgctttccgagctttcctacatgcgattgccgggcttggttccagcattcggcgaggccaagtcggtggcgaccgtgccgatccgtgacttgctgcgcgccgaaagctacgatgagatgtttgtttcgaattcctctgaaatgaatgattatcggctttcgttgctgcgcgcggtttgcgaatcgccgcgattccgcgggttgcgggtgggggagtatgacgaacgtttggatgagggcgagcagcagcaattcgctgcgatgaccttcgatttgggtgccgatttcggcttatatgttgcgttccgtggcactgacggcacgctcgtcggttggaaagaggattttaatatggcggtgcgctgcccagtgccgtcgcaagaatcggcatatcgatatgcggactcgattctggacaggacggaacgtttcctctcggcgaaaaaatcacccgacattatgatcggcgggcattccaaaggcggcaatatggcggtatatgcggccatgcaaatcacgcaaagcgatattgaagcgaccaacgaacgcgcgcaacggctcggactgctgccggcgctcggaggaagcgtgccgggacgcaactgcagaatctcccgcatcttctcgcatgacggtcctggaatgtctcaagtcatggtgcatagccgcgcatatcaggcaatcgcggcacgaatcgacaaaaccgtgccggaatcctccattatcggcatgctgttgcaatcgcaaatcaaaccaaccttcgtcaaagccgacgccataagcattctgcagcatatgggatcaagctggcaagtgacgcaatccggcgaattcgagcaggcaagcgagctgacaggcggtgcgcaactcatcggcaaaaccattgacggatggttcgaccgcgtaagccaggaacaacgcgaacgggccatcaaccagatatacgacatcttcgcagccgcggggtacggtaatatcgctgatctggtggcgcattggacggattcgctgccgaaaatcgtggcagccgccagaggtaccgacgtgcaaacgcgcgaactcatcaaagacgtgttcaaggcgattccagccagtgcggcgaaagtcgctgtcggggaactgcgcaacgacaaggagggggatgcgtgatgggcaatattattgactatgcgcgcacggaaacgcgcagtttcgaggcattgccgttccgcgaggctgacgcattggtgttggcgcagctttcgtacgacgaagtaccggaatgcgtgctgcgattggacgatttggtagcgaaatacggtacgttgcaggcgcgtgcgaagcaattcgatattcggcgtccgatcgcatcgttgcgtatgctgcgcaagcccccgtttggcggcgtgacgattgcgcgtgccgatgacgagctgaaccacgacaagcccgtggccgaccatgatgtggagaacgtgggattggtcgatccgcaggtgacgcacgacttctaccatgctgtggcggcgaatccgcggttttccgacgttgagatgagcgcgtattgcgagcagttcgatggtggtgcgcaaacgcagttcgcggcagtgactttccggctgccgtcgggaacgctggttgtggcgtttcggggtactgatgattcgctggtcggatggaaggaagacttcaacatggccttccaatacccggttccagcacaggtttccgcagctgaatacctgaaaaaagtcgcctcgctgtgggatgggccgatactgctgaccggtcactccaaaggtggtaatctggccgtatatgcggccatgaacgccgaagacgagatcaaggaccgcgttgaacgcatttactcgctcgacgggccgggtttccccgaagaagtggtgaaaagtttcgaatatgcgagcgtgagcgaccgcattgtgaaaatcgtgccggactcctcggtggtgggcatggtgtttgaaacccccgaacgttgcgtggtggtgaaatccgacgtggacggcatcatgcagcatttcgccttctcgtggcagatgcacgggggtgaattcgccaaggccgaagatgtggccgacagttcggtggtgttcaacaagtcgctgaacggctggcttgcgggactttccaaagaacagcgtgagcatgcggtcgacgcgctgttctccgtgcttgaggcttccggtgcgggcagtatttctgcgatcgtggcggccggtccgaaagtgattcctgaaatgctcggcacatatgttggcttgagcagtgcggatcggcgcaacatcaatcaggcgttggtgattctgttgcaggcggcgctcgctcgcaatccgaaagttcagcgaaagtgaagcgcgaatgaggcgtgagtactgtgcgaacgtgggcgggcactgttcgcgtagcgtacttgtgttgtaagcgtgaattcgtatacgacatttgccgaaattcggtctagacaacttgtacaataaaacgtggttatgaggcaacgtgactaattattagggggtactgatgccacgaccacgtagggattcggaaatcctgccagcaaaagatcgtctcgaaaacgccttctgggagctgctttcggaacgcgagtacaacaaaatcaccgtcaccgacatcgtgcgcacggccgacgtgaatcgcaattccttctactatcatttctccggactgccggaattggccgactccgccattctgcacgccgtcgaagacacgccaatgccgggcgtgccagggcgggatttcaatcctgacaccgaatggcgcaagcacgtcaccgcgttgctgcgcgatcccgaacagcgtcagcgtctcgaccgattggccttgctggcaggtccgcacagctcgccggaactcgtttcgtcactcaaggaattcgggcgactcaccatgatttccgtacttggactggatgccgacaacctcgatctgaaaaccgatctcatgctcgatttcaccgtcggaggcatgctggccgtactgcagcgctggccgaaactgcatgaaaaactgccgctcgacaccgtattcaacgaggacgtcgccgtactcgcggcgggcatgttcatgtcaatgtcgaaagcggacatgctcgaatactggcgcaggatcttcagcgaaggattcgtacccggcatggcgatttcgcaacagcagccgccgtctgccaagtgaccatcgaaagccggctgtgacaatccagtggtagaaacgatatagcggcgtttttccgcggattgttccgtggaaaaacgcgaacgtgcgaaatgaacgaacgacggggaggttgtccatgatcaacgaagcttacaaggctatgctcggcggaaaatccgtgatccgcgagctgagcgaatacgcgaccgcgcgcggtgccgaaatcggctacgagaacgtgttcgactattcgttgggcaatccgagcgtgccctgcccgcaaagcttcaccgacgaaatgatcgccctgtaccaagaggcggaaccggtcgcgttgcacggatactcgccgtcgctgggcattacctcggtgtgcacggccattgcggaaagcctcaaccgccgcttcgacatggactatacgaccgactacatcttcccgaccacgggtgcggccggcgcgctggcccacgcactgcgcgtggtgaccaagcctggagacgaagtcatcacctttgccccctacttccctgagtaccagccgtatgtcaacggaaccggcgcgcacctgaccgtggtgccggccgacaccgaaaacttccaaatcaacttcgaagcgttcgaacaggcgctgaacccgggaaccgcggcggtgctcatcaacacgccgaacaatccttccggagccgtctattccgccgaaacgctgacccgactggctgaaatcctgcgcgccaagcaggtcgaatacgggcacgacatcttcctgatttccgacgaaccataccgtgaaatcgtgttcgatgggggtgtgcagccgtacccgagcaagttctacgacaacacgctctcgtgctactcgtactccaagtcgctgtcgctgccgggcgagcgcatcggctacgtggcggtgaacccgcgcgctaccgatgccgaactgatcgtgccgatgtgcgggcagatcagccgcggaaccggccacaactgcccaggatccagcgtgcagctggccgtggccaaggtggtggacgaaaccagcgatctttccgtgtacgagaagaacatgaacctcttgtatgacgcgctggtgcgcctcggattcgacgtggtgcgcccgggaggcacgttctacatcttcccgaaggcgcttgaggatgatgcgaatgcgttctgcatgaaggccaaggattacgacctgattctcgtgccatccgacagtttcggcgtgcccggctacttccgtatggcgtactgcatcgatacggaaaaggtggagcgttccatcgccgcattcgaaaagttcgtgcacgaagtctacggccgctgagccctgtgtgcgctcgctggaggaattcggacgcaaataagccaaaggggtgtgtatctgccttatatatggcagaaacacacccctgtccggagctatctcgcttatatatggcaggtcggttggctaaaacagccaaaaacgtacccccgaagtggcgttttgctgaggacgtctgccatatataagcgagataggcgttcttaagctgtgtggagtgtccgtttctgcagaatcggacgttcataggctggtttttggtgtttggatgtccgtttccggtgaatcggacagttgggctgctgtttttgggttctgtttgtccgtttctgtggaatcggacaaacatgcaccggttttgggttttgtctgtccgtttctgccgaatcggacacatgcggactggggaatggtgggttaggcggcctgggttgcggtttgggcggctaccgtcgcggctacggttgtcgcataggcgttcagcgctttgatggcacggtcgaccatttcgtcgacgctgccttcgatggagatttccacgccgttctcttcgggggcaagcggctcaagaatggcgaactggcttggtagtagcgcgggcggcatgaaatggcccttgcgttcgctgagcctctgctgaatgagcttgtggctgccgttgaggtgaatgaagaatgtgggcacgtctttggcgagtacctcgcggtagctgcgctttaacgcggagctggacaccacggtgttttcgccgagcgcctcgcgtgccaccatccaggagttgatgacgttcagccatggccagcggtcctcatcggtgagtggaatgccggctgacattttgtcgatatttgcctgcgggtggaagtcgtcgccttccgcgtacacgtatccgagtcgttcatggatggcttctgcgacggtggatttgccgcatcctgcaacgcccatcaccactacgtgaatgctcatgttgctctccttgctattgacgatcctgtgccgctccgcaccaggaataagactactataaaccgtaaaagtagtatcagtcaaataaaaagtactacgaattggaaaaatcgtgtgacttgctatgctgaagatagtgcaaaatggcggtaaatcacgcaatcgcagatacgcaatcatctgcgattggtgattgccgtgcgtgtcgcagaatacgtgaaacataccgtgaaacaaagcaggcatggtgtgaagtggacaagggaggagcgatcgatggctgaaggcacggtaatcgcagaaaataccgtcggtgagctgatgcaggattcggtgagtcgaacgctcgccatcgaaatgctcgacggcgtgtggaaggctggcgaaagccttacgttggaagccttgcaaagtcgtttcggtatttccagaaccgtggcgcgagaagtcgcgaaaacactggaatccatgaatgcggtactcgtcaaacgtcgcatcggacttgttgcacgtccattcggcgaatggcaggcgctcaaccatcaggtgatcgaatggcgtctccactccacgcaacgcgaacggcagctgtcatccctcactgagctgcgactggccgtcgaaccggctgcagcagcttccgccgcacgtcttgcccccctcgacgtcaaggcgaaattccccgtgtatgcggcgcgaatgcggcagatcgccgaagccaacgaggaaggcgaagccgggcttgcgcaattccatgatcttgacgtggaattccatacgctgattctgcatgaaagcggcaatgagctgttcgccgcgctttccgacaccatctccaccgtgctgcgcgggcgtgtggaactcggcaaatacccgatgaagccgaagtccgacgcgcttgacgcgcatgatgccgtagccgacgcgatcgccaagggggagcctgaacgtgcgcgcagcgccatgctcgacatcgtcgacgaagtggcacgtgccctcaatttcttctgattttcgcgccaaacttgctttcttcagtgaaaaatcgcaattgcgattactatgcggccgactcttgccatgcgcgacttttcagacgtaaggcgacatcggaaatacggcatgaaggcagctctgccaacgtttctttcggtgaatatgaagatgccggggaatacccccggcggcttggagccttccttgttgccaagagaaagcttcactattgcagcaaaattcgcatgcagaatcaatcagtcttggtgattggatttgcatgcgcagttgcaagcaagtgttactttacgctacttgcgggtggggtctttttgcaggagaaggaagatgagggcgacgatcagcaggattgcgatcgaaagcacgcccaccgaagcgttgccggtcagcgacgtggtggtcgcaacgaggaaggtgccgataatcgaagcggtcttgccgaaaatatcatagaaaccgtaatattcgttggcacgattctttggaatgatcttgccgtaatacgagcgcgacaacgcctgaataccgccttggaacaggcctacgagaatcgcaagaatccagaattccgttgcggaacgcaagaagaacgcggcgaacagcacaatgcagatataggcgaccacagccgtggtgatcatggttttcgcgccgaaacgaccggcaagcttgccataagcgatcgcgctcgggaatgccacgaactgcgtgaccagcagcgccattaccagatgcgtagagtcgatgcccagctgcgtgccgtatgaggtgctcatggaaatcaccgtgttcaccgcgtctatatagaagaagaacgcaatcatgaacatccacagcggcttgttcttgcggattgcacgaaaagtggagccgagctctgcgaatgtgccgcggatggcctcaccggtctgacccgcggtagcgcggtagtgcacctgcttatagctggtgagcagcggaatggtgaacgccacccaccacaatgcggtgattacgaacgaagcgcgcgtgcatgccaccgtggaccatccaagcaacgacggaccgccgaaaatcagcgcgatacaggcgataaacggaatcgtggagccaatatagccccatgcgaaaccatgcgaggacacgcggtccatacgttcattcgacgtgatatcgaccagcatggaatcgtagaacgtgagcgaaccgttcaggccgaccgtggcgagaatgcacaccaccaagaaaacgagccagctgagcggcaacgccatcgcacagcaggcgaccacgcccgtcaggaagaatccggtaaagaacttcaccttcatgccctgcacgtcggccatggatccaagcacaggcatcatcaccgcgatgatcagcgacgcgatggtctgcgcgtacccccatgtcgacacgatattcgattggccggcggactgcagcagcgagtttgcgtagattggcacgactgcggtcgacagcatcacgaatgcggaattgccgacatcgtagacgatccacttcttttcgcgggtggtaagttttgcgttggggtccggcatatgctctggggcagtctctgtggccatgtcggacgtaggtgcggatgcgggcgctgttgcgcgttcggacatgattgttgactctttcgaataaaccgtcaattcactattgtatatattacagttcatcttaagcggctgtaaggggagcgctctgccgttacgcatgaacattgcatgaacattgcgactgatgtgtgatcgacgtaaaaaatctgaaatatcgaaatgctgcaaataatactgggaatactgaaatgacggagatgaacatgtgcagattgtagattgcaccatctgtatgttgatgtcgtatgttgatgtcgtgaaaaacgttcgcagaacggtatattggaacgtgtcaaaatactgggaaaacacgaactaagtttgctgtgtgtgactgcagccgcgctgttgcgtcggcatatttctgcgaagagtcgaggagtctgtatgagtggggaagttccggacatgcttggtgcgaacgctgaaatattgcgctcgatattgagccagccattgcctgacacgctcgacatgatcatctggcgtggcgtcacgaactccgcgcaagcgtcgccattcgaacgattcgcggcacgacttttggtggaagccggtgctgcgggcatccgagacattgctgccgaaaacgattttgatgtgatccgactgagcacgacgaaacgattctggctgcgctgcaacggcaacgatctttccaatgaacaattcaatgttgtgcaggcggtcgaatcggcgcttaaccgcatcgactatgccgacgacgaagcgcgcagggcggtgcacggaggtatgccggaagcgtgcatcgacgaaaacttctatattgcgaaatcgcaacagtatctgcgaaacgtgtcgggtgcgatcgtggcaatcgacggtctgcaggaaggtgaaaacaacttccgtagaatgaggggtacggaaggggcgcgcggcgggaattgggatatcagcaccagattcgccaatgtttgcgaaaatctcgaattgcctttccgcttgcattaccgatttgacgtcgatgcgtccagcggcgtgatggtagtgcgtttcagcataccgaacacggcgatcatgccggttgcgtcgcaatatcgcgacggattcgcctccgcgtatgccgtgcgattggcgggcatgcttgcgtgggcggcgttctcgtcaagcgtacgactgacgcaagtcgatctgaccggttgcgtgggggatgctgacggcattcccgtgatttccatgggattcgatcgcgtgccattcatgatgggtgcgctgcctgccatgaaaaacggacaatgcgacgtggttccgttggatgtcgatccgctggcgctgctcaatttgctgcgcccggtgcgttatgtgggtttctttgatgggaaccgtgccctgacgccaatcacaccgctggcaacgccagccgtattcttggagaaacgtgtttccgaatggcaggatcaacgtgcgctgcctgaaggattgcggggattcctacgtgccgaccgtgcctgcgaacttgacgtgatgcatgacgaatcgccggtttccaccgatgatgtgaacgcgattatggaagaaaacgaaggatcccccatggttgccgaactccaattggaagccgcgttggcgcaacttggcgaaagcggtgaagcaggtggggtgtgcgaagcgggcggaactgacgagacaggcgtagcgaaaattggcgaaaatggcgaaattccgctctactgcagccgtccaggcgtgcgactcatcatctccctgctagacggcgacgaacacacgcgctactggaaactgccggatgctgtagtcgacgtacaccagaatcttggggaactcgccaaaaacaatggcgactatgagcgcgcggaacgtgagctgcgcgcctgcatcaaacttgccccaaccagcgtacgtttctacgaggaactatcgcaggtatacgcaagaaccgacgaatacggcaaagcggccgacgtgctcatcggcgcgttgaaaatcgcagtgctgcctatcgattgcgaagtactctactatcgacttggctacgcattgtggcagttgggacgtctgccggaagcgctcgcctgctatgcgatgatggtcaacggcggcacgccattccgtacggccgcgcgcgatgaggccgaagaagtgagtaggcagatgggattgccttcgccggatatgaaatatggggatgcgtgcgatgcgctgcgatccggcggcgtaccggttgcgccggaagacaaggtgttagatacgattgcccgcgccgcgatttgcctgacggatgctggtttcccgctactggctcaggatgcggcttggatgcttggaatgcgcgatggcggtgatgtgatcggcgcggttgcgatgagcctgcgttttggagccgaagggcgttcgaagaactagcgcgacgacgccgggtggggtgtgctgggcggtttgactggctggcggctcgggctatgactggctggcggcgtctatgcgcgggcaaatggtggtttggatgcgctgtctgccgacctgacgcatgttgaccagacagcggcattccggggaatttaaggcgattgctatccacaaatttgcgattggctggggctggttgtatagttgagaagttgtgtgttctgccttgcattcagttgcggggcatcgaacgcgcagacttgcaagtcaatagtaattatagggagtccattatggcagctcgttgcgcagtgtgcggcaagggaccgcagaccggtttcaccgtttcgcactcacatattcgcaataagcgcaccttccgcccgaacctgcagccggttcgcaccaccatcgacggcgagaacgttcgcgttcgcgtttgcgtcaagtgcatcaaggctggcaaggttcagcgcgttgaagcgtgaatcgcgaaataacagcttgaaaccccggtagaccaatggtcaccggggttttgctttatcttgatcccgccagggctttaagcgttcggatttctccactcgatggagaaatcttcccgcttacagtggcgtttgcgtccgtattcctccagtaggtggaggaatactcccattggttggctggtttgcgtcctgatttctccagcgactggagctttttgcccgctaaggggcttgtggacggggtgatttctccagtgggtggaggtttttgcccgctgaggggctggtttgcgtccgtattcctccagcgagtggggaatttgggcggtttgagtcgtacccagtggtagaagccgcatctgtcggcataactggggagaatggtgcgttatgagcaccacactggaaacaccgatttcatcaatcgagagcaaccgccgcagagtcggcgcgctgaaatcgcttggtgtggtgtcagttggcgacgccctgacctattatccgttccgcgtaaccgatccggttcccgcgcgctcactgcatgaagcgaaaatcggggagaaaatggcgttcgccgcgcatgtgctcgaaacgcgcgttttccccatggcacgtcgaggcttccgcctgatcgcaacagtcacggacgacgatttcgcagcgcgtcgcaacaccccaaaatcgttggcgtcgctggtcttcttttcgtatcgcaaatcgtatgttgactgggtgcagcgcaaactgcacgcgggagcgctgctcgtcgtcgcaggcgagccaagcgtgtacgacaatcgtctgcaattcacgcatcccgacctgctcaccatcaatcccgtgcaatcgcagtcggaaaacggggaatggaacgacggtttcggcgatcctgcgaatccgcctctcggcaatctgaaatacgatgcgcaaacgatcgacgaagcgctgaaacgagtttgccgtccacgaccggtatatcatgcaacttcgcgaatttccagcgaacatattcatgaatcggtattgaaatatatggatgcgttgcgcggagccgaatatttggcaacgcaaaatgcagggaatttcttagataatcctacgcaagaaggggattttgatattccccaaattgatcgagaaatacagattaaagtactcggtaatgctattcccgatattattccggaagattttcgtgaggaatatgggcttatgcatcgtgctgaggcattcatggcgattcatgatccggttgatcgcaagaatttcgataacgccttgcaaacgttgcgatatgaggaagcgctgatctgccagaccgcgctcgtcaaatcacgcgatgcatcgcgcaaatccaaggctaccgcatgccctgaaacgcggttgaaagacgatttcatcgcgtcgctgccattcgcccttacgaacggccaacagcaggtcatcgccgatatttccgccgatatggcgcacgattaccccatgcaacgattgctgcaaggcgaggtcggttccggtaagaccgtggtcgcggttgctgccatgatgcaggccgtcggatcaggcggccaggccgtgcttgtagcgccaacgcaggttcttgccgaacagcattatgcgagcatttccacaatggtatctaaactgggaaaaagcgacgcaaattcgagtgataatcaaaaaaatctagatgatgccaatgcgcggcgaagcaataaacggtccgcgcaaagttcgaaagatggggaattcgacgcaaaaacaattcacaataatgctgtggataaaggtgtacaacttgcagaccttcttgatttggccgcatctgatgatgtggaaaccggattttccggcaaaggaaacgatatatttggcacaaaagatggggagattcctgtatttcttctcacgggaagtatgcgacttgccgaacgtcgtcgcgtgctcgcagcagccgcatcgggcatgccctgtatcgtcgtggcgacgcacgccgcattttccaagagtttccaggcgccgaacctcaccttggcggtgatcgacgaacagcaccgcttcggtgtggaacagcgcgaatcgttgaattccaagggttctacggcgcctcatctgttggtcatgacggccacgccgattccgcgcaccgcagccatgacctggttcggcgatctcgacatttcctcgctgaccgaacttcccggcggccgcaagccgattcgcacattcgtggtgccggaagacaatgcgtcgttgatgggtgaaatgtttgccctgattcgcaagcgcatcgacgcgggggaacgtgcctacgtggtctgcccgcgcattgacgccgatgccgaagatgcggacggcgcgctggcggcgtcagcggcttcaggctcgaaaaccgcaggttcgtcggccgcggcttttgacgacgcctacgatcttggcgaagacgacgaacagcgcgcacaacgccccccgttgcattccgtggcggaaatcgtggagcgtctgcaatcgctgccgcagttcaaaggcattcgattcgccacgttgaccgggcgtgacgatgacaccacaaaatcgcaggtcatggccgattttgaatccggcataacaccgattctggtggcgaccacggtgatcgaggtcggcgtggacgtggcgaaagccagctgcatcgtgattttcgatgcggaccggtatgggctttcgcaattgcaccagttgcgtgggcgcgtcggccgaggcggcaccgattcgggggctttcctgatttcgcgtgcgcccgcggacagtgatgccgcccgccgtcttgacgtgattcagggcacgttggatggtgccgaaatagcgcaggccgatttggaattccgcggcgccggcgacgtgctcggcgacgcgcaatctggcggaaagtcaggtttgaagctgcttcgtgtggttaaggatgtgaagattattgagcatgcgcgggttgaggctacgaggcttgtcgctcaggatcctgatttactcgaacatgtgcagttggccggggcggtgcttgatttcacgcgcggcaatgaaacgttcctgaccagtaattagtttggtgcgattaattaatcgcctggcacgctagagtggtgcgtatgcgcgtaatttcaggacgattcaaaggcgttgcattgaccacgccgaaagcgggcactcgaccgaccaccgatcgcaccaaagaggcgattttctcgcatctcgattcatggggagtgttggacgatgcccgcgtgctcgatttgtttgcaggaaccggcgctttgggcatcgaagcattgagccgtggcgcacgagagctggtggcggtggaatcatccgctctggcggccgcattgatcgcgcagacgctgaccgcgttgaaacacaaccgttcgtgggaacatggcatgagtgcccgcgtggtgaaggctcgcgcagaaaaatacgcggcttcagcttcggccgttgaaccgttcgacatggtgttcatcgacccgccgtacgccttcgaaacgaatgattgcaaccagctgctcgccgatcttgccagccgtgaactgacttccagcaacacggtgatcatgctggaacgatccacccgttccgaagagcccacggctccagaaaactgggaaatcaccgatcggcgcgattatggcgaaaccgccgtctactacattgaacccagcgagccaatctcagataacggtcagcaataatcgcaagaaaaaacttgcgattattccgcgtaaaaacaagcgtttaaaagctagcgtttgcgcggatgggcggcggaaacctcccaaccgagcgccatcaaggtcttgcgatcggccttgtcgagcttggtgcaatccaacgcttcaattagatccggacgcagctcgtcggttttggccaatgcctcatcgcggcggaaacgatccactttcgcatgattgccggaaagcagcacgtccggaaccttgatgccacgccattccgcgggcttcgtgtactgtcggtgctccaacagcgcgttctcgcccgtatacgattcctcaacaatcgaagcggcattgcccataaaaccgggcagcagccgcgtgatcgcctccaacatgaccgacactgcgacctcgccgccgttcaacacgtaatcgccgatcgaatattcgcgcacgtcaatgccttgcgcgcggtaatactgcggaatgcgcgcgtcatacccttcgtaacggccgcagccgaacagcagatgatcggcatggctcagttccgtcgcatcctgttgtgtgaacagcggggcggaaggattcggaaaaatcagcacaggacctgcggaagatggtgcaatatcagttttttcggaattctcaggacctgcggaagattgtgcagtgtcggaatctgcagtatcgcaagaatcgccagtatcgaaggaatccgcagaatcctcaatattttccgtattttcgattaccgcaggctcaagctgcagcagctcgtcgaggcattcgctccacacttccggcttcatcaccatgcctgcgccaccgccgacaggagtgtcatcgacggaatgatgcacgtcgtgcgtccagtcgcgcagattgtgcgcggtaacctccacaagccctttcgactgcgctttgccgagcagactgaggttcagcacttcaaaatattccgggaaaacagacacgatatcgatcttcataatgttcagaataccgggatgcctgccaagtggcaggaaacataaaaagtgggcactggattccaatgcccacttgaatggatatgtgatcgaaagcgcgtaatcatgaatgcttacgcaggatcgcaaacgatcacagtcccggaataagacctccaggcggatcgagggtcagatagccctcttcgaggtcgatgtctggcacgagctcgtccacgaatggcacgagcgcgctgttctcaaccacaacgccgtcggcatccttcaccggattggcgagacgaatcttcagcagccattgggccacttctatcacgtcaacgactttgccgaccaccacgcccggttcgagaccaagcatattgtcttcagccagtcgcgcctcaagaccgatgaggtctttcggataccactcgtcggcttcaagcatgtcttccggatcatccgcctcgccatacagcacaatgccgttggccgcttcggactggtcgcggttgtcaatgccttcgaacttgatgatccaacggttcttgaaagtacgggagttctccaccacatactcttcttcgccgtctttcgtgtacaacacagcaccgggagcgaaccggtattccggttcgtccgtaaagatctgcacggtgacttcgcctttgagcccctgcgcacgcccgatacgacagaccctcagcagctcgggctgttgagggtcgtcagaatgcatatcacgcaccacgctaggatctcacctgcgcacgtccatgatgtcgacgcgcaccttgtggtcggacagtgcctgcaccacggcgcgaatcgcatttgccgtgcgtccgctgcgtccgatgacgcgaccgatgtcttccgggttgacgcgcacgcgaatgagttcgccacgcgcgttctcatgggacttcaccgaaacgtcgtcgggaaaatcgacgatgttcttaatcagatgttccacagcctgggcgagcatgatcactcagcttccgcagccggctcttcagccggagcttcctcggtagcggcggcttcggcttcagccttggccttggcgtcagcttcggactttgcagccttcagcttctgagcctgagcctcaacggcctcaacgcgagcggcggcatccgggccggcttcaacggtcttcagggtgccttcagcaccgtcaaggcccttgaacttctgccagtcaccggtgatcttcagcaggttcagcacctgctcggtcggctgagcgccaacgccgagccagtactgagcgcgctcggaatcgataacgatggtcgaaggctgggtgttcggattgtaggtaccgatctcttcgatggcgcggccatcacgcttggtacgggaatccatgatcaccacgcggtagaacgcgtagaacttcttacccatgcgcttcagacgaatcttggttgccaaaatggctctccttgtataactaggggtgtgcgtttcgttttctgtgtggggcacggaatccgaaacccacatgttcctcacgtcacgcgatagttagagggcctcgcgcgcgcgaataacttatcaagtataaccgtggggtacggacggatgggtcttaggatgtttcccgctctatgtgactttccgaatccgtgcaaaaccgggaagtcgtttgtctgattctgcggaaacggtcaattatgcggcgaatgtgatgccttgaatgaccgaatcggcagaatcggacatttgctggcattcgtgagatgtttgcgtgggtctacatggcggaatcgtcggaatcaggcaggctggctacacttggaggttccgagtttgcgtatgtccgttcggagtgaacggtttgcatagggggagttgcctgaatgattatcgcgctttggattgcgttgattatttgcgttgtatggattgcgcttggcgagatgccggctggttgggatggccatttgccgctgccgtacttgattgcgttgattccgttgctgtggattccgacgcttgtgatcgccgtcgccggtttcgcgttgcatgagccggctctcgggggagtcgctgcggtggtctgtcttgcgtcgctgctacgcaaaatcgcatattggatggaaaatcttaattctcccaatactgcgcagagggttgccgaaaaacttgcggaaaagcgtgaaacatctcgtgaaacaggcaatgaagctgttacggaatccgcgaaacatggccgtttccgtgtgatgacgctgaactgccgatttggtcgcgccaacgctgcggcaatcgtcagtgcggtcaaaaaacatgatattgcagtacttgcattgcaggaattgacggacgatctggttgcgcaattggacgcttcgggattgtctgatttgcttccgtaccgtcagttgggggagagcaagggaacggacaatggcggattcaacggtgtgtggattcgtattgaaccaagcgacatgtctccggtcactgcggtgattcccgcggccgacgtgccgggcgtgtgcttcccgatcgattcgatgcgcggcatcacgtttgtttcggcacatccgaagtctccgatgcgcggatgcagggaatggtccgccggtatcatcggtttgggggagttggcgaccactcagaagcagggcgacatcaccgttgtgttgggtgatttgaattccggtaccgatcatccaagcttccgcaagctgctgaatgcgggcttcaaggatgcggccttgtgcgaggcgaagggccgtcatgccacgttcccatcatggctgccgtggccgcgcatcattcttgaccatgtgcttttcaccaagggattggacgcttccgacgtgagttcgttctgcgttgaaggtagcgatcatcttgcgcttgttgccacgttgacgttgaagtagttgatggcgattataaggtagtcgattcagctgaaaacagctgattggagtacgcaaaaaggggatgcgattcgtcttgaatcacatcccctttttatacgttaccgttttcgcgtcgcttgctttagtgcagcaagccggacagtccgccgccaaagttcggcggcagctcaccggcatcgcccatcaagtcttgcaatccggcgggaagtgcaggattctgcggcttcttggcaaaagcggaaccgccggaaggcttaccgtcggagttcttgccggcaagcttgtcgcgcaatgccttctcttcagcctcgcgcttcatcggattgccggacttaccgcccttcttcttgcccttcttgcctttacccttgcctttgcccccgcccatggcagggccgccaaagccaggcatgccagcgccagccttgttgctcatacgcttcatcatcttcgcggcctgctcgaaacgctgcaacagcgcgtttacctgcgaaacggtcacgccggaaccgtaagcgatacgagctcgacgagaaccgtcaataatcgaagggtcacgacgttccgcaggagtcatcgaacgaataatggcttcagtacgatcgatttccctctcgtcgaactgctcaagttctttacgatgcgcggccatacccggaatcatgccaagcagattcttcatcggaccaagcttgcgcacctgttgcagctgatcgaggaaatcatccaaaccaaaggaaccatcggaaatcttgatggcggccttacgagcctcttcctcatcgaactgcttctgcgcctgctcgatcagggtaagaatatcgcccatatcgagaatgcgggaagccatacgatccgggtggaaaacctcgaaatccttcagaccttcgccagtggaagcgaacagaatcggcttgccggtaacggatgcgaccgaaagcgcggcaccgccacgggcatcgccgtcaagcttcgaaagcaccacgccggtgaagtccacgccctcatcgaacgccttcgccgtctgcacggcatcctgaccgatcatcgcgtcgattacgaacaggatttcgttcggctgcacggcgtcgcgaatatcgcgagcctgcttcatcagctcttcgtcaacgccgagacggcctgcggtatcgatgatgaccgtgtcgtacagcttctgcttggccagcgcaacagcgtcacgcgccaccttcaccggatcgccggtggtcagacccggggaagcaacggcttcgccaccatcggactgcacacccttttccggagcgtacacgggcacgcctgcacgttcgccaaccacctgcagctgcgtcactgcgttcggacgctgcaaatcggccgcgaccaacagcggagtgtggccggaatccttcagccagtagccgagtttgcctgcgagggtggttttaccagcaccctgaagaccggcgagcatgatgacggtcggcggattcttcgcaaaattcagcggtcggtcaacgccagcgccaagcacggccgtcaactcttcgttgacgatcttcacgacctgctgggccggattcagcgcctgggaaacctcggtgccgagcgcacgctcgcggattcggccggtgaaggaacgcaccacgtcgagcgccacgtcggcgtcgagcagcgcgcggcggatttcgcggatcgtaccatcgatatcagcctcggaaagcttgcctttgctcttcagatgcttgaacgcattcgagagcctatctgtcaaagaactaaatgctgccataatgtccctcagtctagccgtcccgcgggaaatttcgcattccaattaatggtgttgatgatgttcggttgatattcggtgagatgcttgatgctatttgcatgagaaatgacaatcccgtctcttccaataggagaagacgggattattgcttattaagagcgctgcggattatttgagggtccaggtgggaccctggggagtgtcttcgatggcgattccggctgcgcccaaggcatcacgaatggcgtcggcgcgggcgaaatccttggccttgcgggcttcggcacgctcctccaactgttcggaaaccaaacggtcaagcgcagtatgctcagcggaatcggcaccggctccggcggcgccgccggccgcaccctcgcttacccacggctccgccaacggatccaaaccaagcgtatcgagcatcgcacgcacattcaccaaaacagcgcgaacttcatccttcgcaacatccgaatcaacacgatcggcaagcttcgaaagcaacgtgttgccagaacgaatcgccgtgaaaatcgcagcggaggcgccggaaacattaatatcgtcattcattgcggcgacgaaatcagccggcagctcatcggcggaaaccgaaacgatctcctcacgggacggctgcccgccaacggcggcaccggcacgttcgatgaaattcgacacacgatcgtacgcggactgagcctcggtcaacgtctgatccgaccattccaacatggaacgatactgcacggaaccaagcgcgtaacgcaccacccaagcggaattttccgccaaaaccgccggcacggacaagccgttgcccagcgacttcgacatcttctcacccttggcggtaacccatgcggaatgcatccaacgagccgccgaatcgtaaccggcggcacgagtctgcgccatttcgttctcatggtgcgggaaacgcaagtccagcccgccgccatgaatgtcgaacatatccttcaaatagcggtggctcatcgccgagcattcaatatgccaacccgggcgacccgtgccgaacggagtattccaacgcgcgtcaagcggatcggaatccttcggagccttccacaatgcgaaatcacgcggatcatgcttgtcttccgacatgtccgcaggatcaaccggattgtacttgtcgttgcccgtattgtcgacagacggacccatggcatcggccacctcggaagcggcatcggccacagcggtctgcttctgatgcgtcaactcgccataatgaggccagctggcaacgtcgaaatacacgttgccggtcggatggccgttctcatcagtcaccacgtagccgtggccattgtcgatgatctgcttgatcagatcgatcatgtcaatcatgtggccggtcgcacgcggctcatacgtaggcggctcaacacccaacgtgttgtaagcctcagtgaattcacgctcgtaaatgtacgcgcgctcccaccactgctgaccggcggccgcagccttatcgagaatcttgtcgtcgatatcggtgacattgcgcacgaacgtgaccttgtagcccaaacgctcgaaccagcgacgcaccacgtcaaacgcgacagccgcacgaatatggccgatatgcggcgagctctgcacggtggcgccacacacgtacatgccgacctgaccaggcttgatcggcgtgaaattcgacacggcgtgcgatgcggtgtcgtacagcttcagatcggcagcggcgctcgccactgcgtcaactgcggttgcggcgctagaaatgttgatattctgcggttcttgcgtgttcgtcataaccacgagagtattgccagaatcggacatgcatgcgagatgaaaatgaacggcaaaacggtttttgttggatttgtgaacatcgtttacgtaggtgatgtaacaatagaacgtatgacgcaatcgcaggtgctgattttgcaacacgttccgtgggagagaccgggacgcattttagacagtctggatgatttgggactgcagtatcaaatcatcaatgtcgccaagcagaagaaaccggatttgcctgattttggcgaggtttccggcgtggtgatcatgggcggcccgatgggtgcgctcgactacgacaagtatccgggattaaaggccgaggccaagctcgcgcgggctgcggtcagcgttggcaagccggtgttgggcgtgtgcctgggacatcagatcatcgccaccgcgctgggggcgaagctgaagtcgggagatgctccggaaatcggttttgcgccgattaaatgcatcgacaagcatgattatttctcgatgtggaacaaaaccgtggatgtgctgcactggcataacgacgtggtgtcgttgccggagggcgcgcagccattggcacgatccgcgaagaccaaggtgcaggcgttccgttttggttccgctctgggcatgcagttccacttggaggttacccctactctgttggaggagtggcttgacgagtcaagcatggtcaaggatctcaaggctgtcggcgggtcgaaatcgcagttgcgcgaggcgttcgccgaatataatccgcagttgcagccgcttgcggatcaggtgttttcgagttttgccgctcgttgtaattcgtatgggcagaatttggctcagtcgcagcagggctgatcgccgagttgcgtgcggctccgattgctgcgtagcgctggtggcgattcgcaagttgcggcattgcctgcaggtttgggagatgttcccgctacattggtgacttatgccgacttatgatttgggacttgaacacgtttcgcttgcttttgcgaccaagaatattttcaacgatgtaacgcagggtgtttttgaaggtgaccgcatcggcatcgtcggtaagaacggcgacggcaagtccacgttgctgcatttgttcaaaggcacgcaggagccggactccggtcgcgtgaccattcgcggcgggcttacgctcggcatgctcgaccagcgtgacccgctcgacgacaacgccaccgtgcgcgaagctgcgctcgaaggccgtgaagactacgaatgggctgcggaaaccaagtcgcgcgaaatcgtcgaagcattgcttggcggcatcagcttggaagcgaaaatcggttcgctttccggcggtcagcgtcgccgcgccgatttggcacgcctgttgctcaaggattgggatattctcgcactcgacgagcctacaaaccatttggatgtggtgaccattcactggctggcggaacatttgaagaaccgttggccggccggatccggcgcgctgctgctcgtcacccatgaccgttggttcctcgacgaagtgtgcgaatccatgtgggaggtgcatgacggcgaaatcgagccgtttgaaggcggctattccgcatacatgctgcagcgcgtggaacgcgatcgccaagccgacgtgcgtgaaacgaaacgtcgcaatctggctcgtaaggaacttgcctggcttacccgcggtgcccgcgcccgttccaccaagcagaaattccatgtgaaggccgcgcgtgagctcatcgccgacgtgcctccggtgcgcaatacgctggaattgaagcaaatggccacatcccgcttgggcaagcaggtggttgacctgattgacgtgacgcagattttcgaacatgtgcaaggcgaggccgatatcgatccggacgttgccgacatggaagcgtcggcatcgcgcgtcgatgtggtgccggccatgtatgccgagccgcaagtgcatggttccgtggaagttgccgtcgacgatctgactgatccgcgattggtggatgccggtgttgcagcggcgcaagttgctgcagctgcgaaagaatcgcaagaaattcaggaatcgcaagaaaataatactgatgatcctgcagaagaaattacttctgcagcgcaaaaaattactgttaccggtcgtaagattcttgacgacgtgacatggctgatcgggccgggcgatcgtttcggcatcgtcggcgcgaacggtgccggaaaatcgacgttattgaagattcttgacggcacgatcacccccactgtaggtcatgtgaatatcggcaaaaccgtgaaattcgcggtgctttcacagcgtctcgacgaattggagaagctcggtaaatacaagatcaaggaagtgctgagccgttacaagccgagctatatcgtggacggcaaggaaaccacgccggggcagatgatggagcgtctcggattcgagtcggcgcagctgatgacgccgatcaaggacctatcgggtggtcagaagcgtcgtatgcagttgctgctgatcctactggacgagccgaacgtgctcatcatggatgagcccggcaatgatctcgacaccgacatgctcgccgtgatggaggatctgctcgacacttggccgggaactctgatcgtcgtctcccatgaccggtatctgctcgaacgcgtcaccgatcagcagttcgcgctgatcggcggcaaggtgcgccacctgcccggtggcgtgcaggattatctggacatgactgaggccatcaagaacggcaagaatccgtttgcggacgaaaaggcaggtgccggcaaaggcaagaagaacggttccgctggagctgccggttccgcgggatctggtgcaactgaaggcaatgcaggcaattcagcgggtgaatccgcaactgccgaaaccgcatcttccgcaccgaagctttccggcaaggccttccatgaagcctccaagcgcgtgtcagcaatcgagcgcaaactcgccaaacttgaggatcagaaagctgaccttgaacagcagatggccgcgcacgaccccagcgactacgaaggtctaggcaagctcaacgagcagttgcaggccgtcacggacgagtccgaatccctcgaaatggagtggatggagctctccgaacagctcgagtagcgattcgtatcgcccgcgccaattaccggacagggtgtgcatgttgtggcggtggcgcagctcctccagcgtttccggtgaatgttgaccattcgtgcgacagcgatgcgtggcattccatgtgccaatgtcatattcttgttattgcgggaaaccttagctgttcttgtcggagagaccaatggaggtgccttatgaatcaagtgatgcgaagaagcgtctgttgcttgttgtccaccttgttgttgtggtcatgcgttggctgcacgaaagccgtacatgaaagttccggtgatagctccgtacagagcggtagcgagaatgatgatgccgcagaacaggcatataaagcatttactgtggacgctctggaccgtgtcgccgtcgatgatctcaataactcagacaaactggttctagtaaacaagctgggggcgaaatccgtgcacggtgatggtgctattccatttgcccaaaaagtcgacgaaaacaatatgtattatgtcgtttccatgtgtaaacagaaggaacaggttccttattcgtttgtcctctacaaagatggacagccgcacaccctaactactagggaggcatgtacgtctaatggagtggaaacagtctctcttccggcgaagaatttcccagatgccacctcattgtccattatcaatatcggcaatacggatcttgttgtttccatatatgaagtaaaagaacaccatcatgaataatttcagtcataatgctccctgtcgtgctgccatcatcatagtttgtgacatcacaatgaatgctactgggctagttgttgcaaaactggctcagtaggtagatggggtagtaggtgatgttgtggttggtttcgatgttgccggggccgaaaactaatccttggcgaaggtgataactttcctctgcgagcacattattaagagcccgatgaaccttgtttgatatcttcttgtgcctgacgaacgtctatgagactgttgttttgtgcaaacgatgctactgcagtcggcatgcctccaataatcagatattttctgaatatcgcagatttgacaacaaaaagggctttcccgcgttgaaacgggaaagccctgtaggtttgggattaggctgattggatcagcgaccggtgatttcggagccgagcaccttttcgctcaaggccttcggaccgcgcgtcactgcgaccgcgccggaacgaaccagctcgataatgccgtaatgctccaaaagccccagcagcgcatcaatcttgccttcggcaccggtggcttcgatggtcagcgattccggattcacgtcgaccacgcgcacgcggaacagacgcacgatctcaagcacgtcggaacggttggattcgtcggcagccaccttgataagcaccagttcgcgctccacagtggtattcggatccaaatccacgattttcaacacatgcagcagcttgttgagctgcttgatgatctgctcaagcggcacctcatccacatcggcggtcaccgtgacacgcgaaatgtcaggacgctcggtgggggagacggacagcgagttgatgttgaacgcacgacgggcgaacaggccggcaatacgtgccagcacgcccggacggttctctacgagcacagaaagcgtatggcgcttggaacccggctgagatgcaggatacattggtagacccttccttactacttactcgtttactcgttgtcggcagcggccttcgggcgctgcagcggcttgattccgggcatataggtgacattgtcgttggaatcgccagctgcgaccatcggccacaccatagcgtccttccacacgcggaagtcgataagcaccgggcgatcgttgatttcgttggccttcttgatcgcctcaatggcttcttcttccgtgaacgcacgcatgccgatgcaaccgtacgcttcggcaagcttcacgaaatcaggaacatccacgatttccggcgtattctctccatccatcagattggtggcggaataatgctcgccgtagaacagggtctgccactgacgaaccatgccatacacggaattgttcagcagcgcgatcttgactggcgtgtgatcgtggaacgcggtcgccagctcttcagacgtcatctggaaggaaccgtcgccgtcaatcagccacaccggcttctcgccctcatggaaacgttcggaaccgacacgagcgccgatggcggccggcagtccgtaacccatggtgccaaggccgccggagctcagccaagaatgcggcttctcgaaatcgatgagctgcgtggcccacatctgatgctggcccacaccggtaacccaaatcgtgtcagaatcagccaggtcggaaagctgcttgatgacccactgcggagcgagcgaaccatcggtcggctcatcccacttgatcgggtacttttcacgccaatcgttgatgatctcccaccaatgcgaagtgtcaggcttgccatgcacggcctgctcgcgcttgatttccggaatgagatccttcagcacggttgccacatcgccaacgatcggcacatccggctgacggttcttgccgatttccgccggatcgatatcaatgtgaatcacacgtgcacccggagcgaaagcgtcaagcttgccggttacacgatcgtcgaaacgagcgccgatcgcaacaagcagatcgcaacgctgcacggcaccggtagcggcaatcgtgccatgcatgccaagcatgccaagcaccttcggatcggaatcaggcacaacaccgcgtgcgggcagcgtggtgacgatcggagcgttcgtgacttccgccagctcctgcacgagcttgccggcatcggaacgtgccgcgccgccgcccacatacagcaccggacggtacgactgctcgaacagcttcgcagcgtcggaaagcacacggccgtgcgccttcgtggtggggttgtagccgggcagaatcatgcgctgcggccacgaatagtacatatcgccggtctgtgcggttttggtgacgtcgaccaccaccggaccagggcggccggaacgtgccacatagtgcgcttcagccagcacacgcggaatgtcctgcgcacgcgtgaccagataggagtgcttgaccaccgggtaggttgcgccgacgatatcggcttcctggaaggcgtcggtgccaatggcgttcacgccgacctggccggtgatgaccaccatcggcacggaatccatgttcgcgtcggcgatcggggtgatcatgttcgtggcgcccgggccggacgtgacgatgcacacgccgacctgaccggtcgatacggcatagccttcagccgcatgacctgcggcctgttcgtggcgcatcagcacaaaacggaagctggtttcatcattgattgcatcgtataccggcagaatcgcgccgcctggaacgccgaaaacatccttgacgcccagatcttccagcgaacgtaccagcgcttcggcgccggtcatcttctcgccgtcaacaatggtctgcttttcagtggttgcggctgccttgggcatgccgctgaatgcctgcaggggcgtaggtaacaccatgttccctctcatattcgctcgtggaactttcttacaggggtatgctgccgcgtttcggtgcacgcaatcagccgaaccccatcatcggaaagcggcgcaatcgcttgtggcgacttgcgaatcgcaatccttcgctagtaatcagtctatgctatcggctgacagaagaatatgccggattcgtgccatattctggcgtattgcgttccgcggcggtatgagagggcggattcgtagctgctttttatctacctgcgactacttactggtgttttcgccgttgctgccgttactttcgttgccgttgtgcttgtgatgatgtttgcgatgcttacggacgttttgtgcttcaggcttgcgattgtccagtgccttccaaccttcctcggctgcggcgagttgcgccttgcgtttgctggtgcctgtgccggtgctgatgatttcgtcgctttcgcccagcatgacgttcgcagtgaacacttgcgcatattccggaccggaaaccgacatctggtagcgcggttcgccgaagcccatgccatgcgctttgacggtaagtgaggttttccaatcgagggctgggccttccgtcgcgacttccgcaagcgtttcgtcaacaagatgatgcacaacgcgacgtgcctcgtcaatgccatgctgaatgaacgtcgcaccgatcaacgattcgacgatatcgcacagaatcgagcttttatcagcgccgccctgatcgctttcgccatgaccgagcagaatgtacgggcctgcattgagcttttcgcgagcaattttgctcaaggattcctcggaaacggctttcgcgcgcattttcgcaagctgcccctcgttcatgtcggggtgtgccttatacagggtttctgtggagacgagctcaagcacggcgtcgccaaggaattccaaacgttcgtagttttttgcgcccggattctcgtgcgagaaggagcggtgggtgagcgcttcgaccagcaggtcgggttcgagcgtggtgccgagcgcttcaagcagtgcgttggcggtcatctcgccttcggaaacggcggatgcgtcggcgttgttctgggtcataatcgtcctcggtttcgtagtgggtatgcgacggcgaagctcgccgcgctgttcgggacgttgcgtacgtggcaacaagccagcgaatctggccgattgctatgcaaacaacgatcccgttcagtctactctccacccatgtcgaggcggaaatgcagggaaatgcgcggatactaggtggatgcgatacttggcggatgcgaggtgagatggtcgggtgcatgcgaatgcatatggccaagtgcgcagcctgaaatatacaaaaccctgccacccgtcgatggcagggtttcaatgcttcatgccgttactcggcagccactcacttggtgtggatggagcggacagcctcgcggtacacgcggccgcggtaggcgccgcagctcgggcaggccatgtgcggcagcgccggagcgccacagttcgggcaggtaacggtctgggcggccttggccttccagtttgcgcggcgagaatgagtattcgcgcgcgaggtcttgtacttaggcagtgccattgtgtttcctctgtttcgttcgaacgattgagcttaagcgttcagtatcttaacttgtgctccgtacaaattgcaaaaaccgagcaaaatcagccctgccagcacccggatggaccttactcgttgccttccagccgggccttcaagccttccaaagcggcgaaacgaatatcggtcacatcgtgatgatggtccggatcctcgttcagatcggcgccgcactgagagcacaatcccaagcaatcaggcttgcacagcggctgcaacggcagttcctcgaccaacgtgtcgcgcagaagcatctcaatatcggcccaggatccgccttcaagcagcggatacgaatcctccgactcgtcttcgccggcgataatgtcgacttcctcttccttgacgccgcccttgccgtttttgccgcccttgccggacgcaacgcttgcggacttgtcttcatatgggaagaacgaagtgacgttcaccgtccaatcgcgcttgatcggtttcagacagcgggtgcattcggcgtgcacgggggcactgatgcgggcgttgaaaatcaggccgtcgacaatggagtcgaacgagccgacaacggtcacatccgcaccctcctcaacgccgacgatctcatcgccgatgccgctcggtgcggggaacgttgcgtcgatctccttgctttgcccggctcgcgaggcgacttgcgccacggaaatcgcccacggggaatcttcgatacgtgccatgttcagccttccattcagctttccggatagtcgtttgcgtcaagatgcggcacatgcgtgctcgcttcgcgctggcgatcatacagtacgttcaatcccgcctgcacgtcgttgccaagcttgccgagctgctgttgcagcgtttccatcaccgtggtgcagtatttgtcagctccctgcgtgagatggtcggccctggcttgcgcttggtcgagaatagcacgcgccttctgccgagccagttcggtcacgttttcctgcccggcgaggaattgcgcctgctcgttggcctcacgtatcgtgtctgccgcacgcgattgcgccgaagcgacgatggcgttggcttgcgtttgcgcgctttccaaacgtcgttccgactcacgcatcaacgctgaggcgcgttccagctgcaccggcatcattttcttcaactggtcgagctgttcggtgaattcgtcgcggtcgacgcgcacgctgccggggaagaacagtatcggtttcgcttcgtccaatgccgattcgagtttgtcgataatgtcgtacacggtggtgaattcgtcgcggctcaaatcgttggaatcgtccagcggcgcgttgggattgaacgtgttgcgtaaatccggcagatcagacatggaaatcaacggtttgaccggctcggcggcgcgtgccgtggcttgtgccttctgaccggattgggccgcccgatcggtcgggcgttcggcggtcacgtcgtcgtcaaactggctgccggccggatcgtacgcattcgtttcttcacccatcatgccctcttttcattattgagcgcttctccgagtagcggaatcacgcaatcgggcaccatgccggtcacatcgccgccgtgacgtgccacatctttcacgatcgaactggagatatgttccaaatcgggcgccgccggcaaaaacagcgtttccacgtcggcaagcttgcgattgaccagcgccatacccaactcggcttcataatcgccattctgccgaagccccttcacgataaccgtcgcaccgaccttcttgcaatagtcggtaatcagtccggttgttgaagcaaccttgatattgcggcaattccgctcttcaagcgccttacggataatctcaacgcgggtctcttcggaaaacatcggtgttttcgccgcgttcaccgccactacgacatgcacttcatcgaaaaaacgcgcgcaacgttcgatgacgtccaaatgtccggcggtcactgggtcgtacgacccggggcaaactgcaattgtcatagcctcaagcgtaccgcgattgcgtgaaattacgcgaagtgtcggcgaatatgtgggttttcatggctatgatggaggcagtggtgccgcggttgcggcgtatttgaggagttgattatggcatgttcgatattcgatgatcgcgacggcttcattgacgaggccgacccggtctcgccgctttccaatcccgacgcgggtaccggcactgcggtgttggaacgccccgaagaggagacgaagctggatgatggcggcaacggcgatgcggatcgtttcgcgcattatgtgtcgcgcgatcgcattgccgagtcccgtcgcaccggccgaccggtggtggcgttgtgcggcaaggtgtgggtgccgaagcgtgatccttcgcagttcccggtatgtccggattgcaaacgcatttatgacgaaatgatgaactccaacttctgatcttttttttcatcgtatttctcgtcgtatggtgattttggaatttcactgaaatttctgaagattgccgaacgctattacatataaaaaatctgccgagatggtctctgtatcgaaattgttttcgataattcagattgtctcggcagatttttattgctgtcgcgttttattgtcggcttgcctttttgaaatatccgcgtttagcgcaacgaaatctcgtcgatgcgacgcagctcctcgtcgctgaacgtggtgttcttcaacgcgccgatgttgtcgagcagctgctgcgggcgggatgcgccgacaagtacggaggtcacgtaaccgtcgtgcaacagccaggcgagcgccatttcggcaagcgtctgcccgcgttcggcggcaagatcgttcaggtcgcggatctgctgcaggcgttccggcgtcaacgcgctttctttgaggaatcgaccgtcgtgtgcgatgcggctatctgcgggcacgccgttgagatagcggttcgtgagcagaccctgttcgagcggcgagaacgtgataagacctttgccaagctttttggcggttttcttcaatccgttgcattccacggtgcggtcgaaaatgctgtaacggttctggttgatgatgaacggcacatgcagctcatcgaggatcgcggtggccttttccagcgtcggaccatcgtaattgctcaggcccacgtagagtgccttgccgctttgcacggcggttgccaacgcgcccatggtttcttcgagcggcgtggaggaatccatgtggtgatggtagaaaatgtcgacatagtcgagaccgaggcgttcgaggctttggtcgagcgaggcgagtagatatttgcggctgccgagatcaccgtaggggccgagccacatttcgtagccggctttggtgctgatgatcagttcgtcgcgatgatgatggaaatattcgcgcagcagacggccgcagttcttttccgcactgcccggctcgggaccgtaattgttggcgagatcgaaatgtgtgatgccgttgtcgaatgcggtgaacacgatgtcacgcatagtggcgtacggcgtgatatcgccgaaattatgccaaaagccgagcgaaaccgctggaagtttcaggccgctctcgcccacatgattgtaggtcatggaatcgtatcgagcgggtgacggcgtgtagacggtggtcggttcgagcattgttcctccttgaaaactttgcatattccgctgtgcgctgtgttgcttgagttgtcgcatgtcgtaagtttgtcgacgatactatcgtcgcacttcaagtaaacttgaatgcaagtatcgtcgatagtgtgttttccgatgattgacaatcgcaaggaatcgcaaaatcgctagaaaaacctagaaaatcgtagaaatgagaaggggaatggcaacatatacgattcgtgaagtcgcgcaacgattccatgtgcagacgtcaaccttgcgctattacgaggatcaggggctgctgtgcgacgtggagcgcgacgatgcggggcgacgcgtgtacaccgactcgcatatcgggcggctcgaggcgatcgcctgcttcaaacatgcgggcatgagcatcgatgaactcaaacgcttcttcgcatacgaaaaagacgagcgtgcgcacattgcggacatgctggaattgttggaatcgcggcatcaagcgattttgaaacagcgggccgcgctggaagaggcgtacatgcatgtgttgcgcaaactgcacttgtatcgcgatattcagcacagcatcgaaacgggggcgccatacccggattgggcgaattatgatggcaaggattttcgcgccgacgatcagtgaagttcggtggactgacgaagatcagtgaagactggttggcgaagggcggtgacgcccagttggcgaaaaagcggaaaataaaaggtgtggaaccgcaaactacggttccacacctttagaacacctagcagaacgtctaatagagactgctgcgactcgtttcagccctacttcagcagagtggccacggatggcagcagggcgcgcaacgccttgccgcgatgggagatggcgttcttttcggccggttccatctgcgcggacgtgagcttctcgccggcttcgacggcacgcgccggctgatcgtcgggcacgaacagcgggtcgtagccgaagccatgctcgccatgaggctcatgcaacagcacgcccggcatttcgccggtttccacgatttcctgagcgatcgcataacgaccatcggcgcctgcgcctgcttcggtttgcggcaccaccagcgcggccgcgcaacggaaacgcgcggtacgcttggcatccggaatgtcggcgatctgcgcgagcagcagcgcgttgttggctttgtcatcgccatgcttgcccgcccaacgtgcggaaagaatgccgggggcattgcccatcacgtccacaatcagaccggaatcgtcggcgattgccgggcagcccgtacgtgcggccacatcacgggccttgagcagcgcgttctcttggaaggtcacgccatcttccaccggatccggcagattcagcgaaccggccgacaccagctccacctgatccgcgttcgcacccaggcaatcttccagaatgcggttgatttcaacgagtttgccctcgttatgcgttgcgacgataattctcacgttccgattcctttcgttgctgttcgttgcttcgttgatgtcggcttgcctgacgtgcgtttgacgtgccctgacttgcctaacctacgattggtttgcgaggccagcctgcggtcggcttacgtccgacttgcagccttcagtcctgtgcgagcgcggactgctgtgcggcctgcagttccttgttgcccttttccgccaggtcaagcagcgcgttcaactcggcgcggttgaacgggcggtgttcggcagtgccctgaatttcaatgaattcgccggaaccggtcatggccacgttcatgtcggtcatggccttgctgtcttcgatgtacggcaggtcaagcatcggtgtgccatcgatcacgcctacggacacggcggaaacgctgtctttgatcacgcgctcggcggacctgatgtgcttgtgcttctcggcccagcgcatggcgtccacgagcgccacatatgcgccggtgatcgacgctgttcgggtgccgccgtcggcctgcagcacgtcgcagtcgatctgcacctggttttcgccgagtgccttcatgtcgaccacgccacgcaggcagcgaccgatcagtcggctgatttcgtgcgtgcgtccgccgatcttgccgcgcacggattcacgatcggtgcggtctgcagtggctcgcggcagcatcgcatattccgcggtgacccagcccaagccggagtccttgcgccaacgtggcacgcctgcggtgaacgtggccgtgcacatcactcgcgtattgccgcattccacaagcacggatccttccggaacatccgtgaaatgacgggtgatgcgcaccggacgcagctcatccaccttgcgtccgtccgtacgaatcatcgtttcgcccaacaagtctttaatcgctaccatcgctgacttctctgctttcgattgatcacacgatcaacaatcgtttgtattttccgaaaaaacagtatcaccagccgaaaacccgtctttccgtcttgaactcgcctcttgctgcacctcaatttgcctatcccaatttgcgtcgtgcccgaatttgcgcgcatctcacgtttgtctcacgtaatacaggcatgcaagcacgtatgatggaacgaaaacctgtgcttggccacggcgaggcctacacttatggtcagtttcaccaaaagtcagaaaggctttggaaatgctggattattcacctgcactcatgaccgacatgtacgaatacaccatgcttgacgcgtgcctgagggacggcaccgccaatcgcaagtgcgtattcgagattttcacccgtcatctgccgcttggccgccactatggggtggccgccggccaaggtcgtattcttgacgcgcttgaaaatttccatcttgacgataatgatctgaaattccttgcagatcgcaaagtagtgggccccgaaactatcaaatggcttgagaatttccatttttctggttcgatcaagggatatcgcgaaggtgagatgttcttcccgaattcgccgattctgcaagtcgaaggcacgttcggcgagtgcacgctgctggaaacgctgttgctgagcattctgaattacgattccgcggtcgcgtcggccgcgtcccgcatggtcagcgctgcgaaggatcgcccgtgcatggatatgggtggccgccgaacgaacgagtgggccgccgttgccgctgcccgtgctgcgatagtgggcggattcaagggcacggccaatctgctggccgcgcaaatgtatggcttgaatgccatcggcacggccgcgcactgcttcacgctggtgcatgatgatgagcgcagcgcgtttgaatcgcagattgccgcgctcggcaagaacaccacactgttggttgacacgtacaacattgaagaggccgtgaagacagctgttgaagtggccggacccgaattgggcggcgtgcgcatcgattccggcgatctggcgtcgttggcgcagcgcgtgcgcaaccagctggatgcgttgggcgctactaacacgaagatcaccgttaccaacgatttggacgagtatgcgctcgcttcgctgcagaccgcgccggtcgattcgtatggcgtgggcaccatgctcgtcaccggatcgggcgctccgacctgtgcgatggtgtacaagctgactgaacgcgagaattccgctggtgacatgcagccggtggccaagaagtcgaaagacaaggccacggttccgggccgcaagctcgccttccgttcgtacgagtattcgctggccgactgcgaacatgtgatttccggctccgaagagcagctggccgcctatcagccggaagaaggctggaaggatctgctggtcggctacgtgagcaacggcgaaatcaactccgattatcagggccacgaagccatcgtcaacgcgcataattaccgcgcccaggcgctggccgaactgccgatcggcgcgcaaagcctcatgaagggcgacccggtaatccctaccgaaatcaccgtcctttgactcgtgctaccatcatgctggttgcgtacggcaatcaatctcgtaatcaaccagcatgaaggggtaggattacatgcgagcattttctctggttacgttgagtccggaggcgtttgacgatttttccgcacatcacgcggacggcaacttccagcagacctctgccgcaggccgtctgcgtgccggccaagggatcgaagtggaataccttggcgttcaagaaaacggcacaatcgttgcgggagcattattcgaaacgcatcacagtcgcctttccaccttcagtgtggtgcacgacggccccttgtgtgactatcgcgatcgcgaattgaccgaatatttcatgacccaactcaagcagcacgcgaaggcgaaaggttccgcacagatggaaatcgtgccggaaatgccatactgcctgcatgactcgcgtggcggcgaactgccagccgaccaaggtggtgctcctgctgatgatgccgtagaaacgttgaaaaacctcggcttcatgcatgacggcttcaccatcggctacactgcggtgccgcgctggcgttacttgaaagacctgactggcattaccgacgaaaagtcactgctcaagtcgtatgacaagcgcacgcagtggagcgtgaaacgtgccgcatccatgggcgtgcatgtgcgcgagctaggcgaagacgagctgcaggtgtttgccgacatcgagcaggccaccgccgaacgccgtaatttcgaatatcgcggtgaagcctacttccgcaagttcaagcaagcttacggcagcaaagcccacttcatggtggcgcagattcacatcggcgaatacattgccgacatggaatccaagcgcgacgccttgcggaagaaggtcgatacgctgcagaccaaatacgacgagcatccgaccaccaaaacggaacgccagctaggggaggagtcccgaaacttggcggcggcggaaaaacgtttgaccgaggcggccgagtacgccaaagacggtgacgtgcttccggcggcagcatccctattcgtggaacacgctcgtgaaacggtgtatctgttctcaggcagtgtggaaaagtacaagccgttctacgcttccgcgctcattcagcatgatgccatgctgcatttgtgtgtggaacgcggtgtgacccgctacaacttctacggcatcaacggcgtgttcgacgatccggaagatgagggtcgtggcgtactcgaattcaagcaaggcttcaacgggtacgtcgaggaactcatgggctcattcgtgcttcccgtacgcccgctgaccttcaaactcaagaccgccctccgcaaactcctgcgccactagctattagctcaccttccgcttggaggattctgggtgggggcttataggtgcgcgagggttatgtgaacgctgttgacggcgactgtaggctggactaggttatcgcttttggtgaaaagggattttagccagttgggatagtgaaaggcagttacggatcgtgatgcgcgaagtgaatgcgagtgaggaacaagagcaagaatcgtctgaatggaatgtgcgcgagctgagcggtagtgagtttgatgagctttccgccgcgagcagatacggcggattccagcagacttccgaaatggcggcattggctcagtccgacggcatgcagacgcaatacgttggattggtggattcgcacgatgctccggtggctggcgcgttggtggctttttcgcaagggcgtttcggcgtggaaggctcgttatggcttggcccgttgtgcaatgggaataacagagagcagatgaccgcgttgaccgaaggtttgcgcgaggctgccgaacgggttcacgccatcagcctgacgtgctggcccaaccaggtatattgcgttcgtgattcgcaaggcaaggccatggccgaacccaatgatgagatggtgcgggagtacgagcggctgggttggaagcatgctggctttacccgtggatacgatgccctgatgaaccgttggaattacgtcaaggacttgagagagttctcgaacgccggcgagctgctcgcttcgtatgcgaagaacacgcgtcgtaacgtcaagatcgcgcggaacagcggcgtggaggttcggcgcctgaatcgcagtgagctgaacgtgttccacgatatttgcgagctgagtagcgaacgccagcatttcgccaaccgtagccttgattacttcgaacgcgtatatgatgcgtttggagacaaggccgagttcatggtggcggaagtgcatcttgaccgctatttgcaatcctgggaggaaaagctggcgaagttctcgaaagacgtggaacgcttggagcgttcgcttgagcatacgaagtacccggatgatgtgcgcaagaagctcgatacggctcagaagaatgtggagtccgcacgtcgccgtattgaggatgcgaacgagcgcatcgctcgtgatggcgaggtggtgccggtcgccgtaggtctgttcatgtggcatgaacgcgagctagtgtatttctccagcggatccgacgatcgttacgccaagttctacgcgcccaccgccttacagcatgagatgatgtcgcgttgcttggaacgcggagtgacgcggtacaacttctatggcatttcgggagtgttcgacgatccggaagacgatggacgcggcgtgctcgagttcaagcagggcttcaacggctacgttgaggaactgccgggcgaattcacgcttccggtgagcaagctgcgctacggcgtgagcgatttggcccacaaactcctgcgccactagctttagggggtttcagccatgcttggcgcgacgcggatttgcgtggggtgagactttctggtacgctttatgtcttgtgcgcggatggcgtgtgcttccgggcattgccactttagctcagtcggtagagcggctcactcgtaatgagcaggtcgacagttcgattctgtcaagtggctccagcgccctagatgtgaaagcatctagggtttcgtatatcaggagcgtttcgccccgatatggctacttgcgcgagtggcggaattggtagacgcgcaggatttaggttcctgtgtctttgacgtgtgggttcaagtcccatctcgcgcactttcggaaaacggcggaattccgccagttcttggtcattgtagtccactcaataagtctttttgagaacatgttgaaaacattttgcccgtttgcgtcccaattcttccactgactggaggatttgggacgttggggagcttgtttgcgggtggattcttccactgactggataatttgggacggtggcaggcttatttgcgggtgaattcttccagcgggtggaggaattgggacgctgaggggcgcgtgagcggagtgtttcttccagtgggtggaagaaacaggacggtgatgggtggcttggtggcaggggatgctcctaagatggcttcgggtaggaagagaaagagatgattagggattaggggagtgtcgtgtctgcgctgattcagcctgttgcgctactgctgattattctcgccggatacttgttcaaacgtgccggcctgttcgaagatcgcgattaccgcattatgcagaccattattttcaatctggtgctgccaggcgcgatcgtctattcgtttgctacgaatccgcatgattccagcatgctgttgatttcgctgttcggcctgattgttgcgttcattccgccggtcgtggttttcttgacgtcccgccaccgaccggtgcagaaccgtgcgttcatgatgttgaatggttccggcttcaacgttggctgcttctgtttcccggtggtgcaggcgtttcttggcacgggcgcgatcgtgcccgccgccatgttcgacattggcaattgcgtaatggttgccgccggtacgaatgtgatgacgcaaacgctgctgcacatcaagcctggcatgccgcttaccgaacagtatcagggcaatgcgcccacgctcccgtatgtgaagccgaaagacaaggatgccaaacgtcttgcccgcaaggcgttggcccgcaacgtgttcaagggtttcttcggttcggttccgttcgacacgtacttggtgatgattattctcacgctcgctaacgtgaagattcctgacattattgccgcgctcgtgcagccgctttcgaacgcgaattcgttctgcgcaatgctgatggtgggcatgcttatggatttgccatctggcaagcaggatgtgcttcagttgttgaaggtgattggctggcgactgccgtttggtattgcgtttgctactgcggcttggctgctgctgccgtttggcgctgagattcgtgagacggctgcaatgtgttgtttggcgccgattgcagtgttttccacgctgtttaccgacaaggtgcttggtaatgcgaagcttgctggttttacgctgtcgattactgcgattatcagtttgctgctgatgaccggcgctcacttcttgttcgtcgcgctcgcataagagcggcaaggagatctttaccgggtgcgggagattgtttgtgaccccgcagagcacgaagtcgttgaatgcttgcttgctggtagttgcagtgccgttttcttgtcgttcactgcataatgcgatcgtttcgtttattacatgtttggaagtgttacgaagacttgcgccggaaccatgcatacgatttcagtaatcgtcgaaaatgcgcatgtcgaagacggaaggttgtcggaaccgcgctatattgcgaatcttggcgaatgtgttaactcaggaaatatttttgtgttgttctgtcttcttttgtgagtatcttgtgaggtgaagagatacggaatgcgacacgcggaaatccgcagggaagccgcaatcgcatccgcttcatagtgatgatgaaaggacctatacaccatggccatcaatcctcctgttgacgccaccaagaccccggagtgggccgcactgcagaagcactacgatgagctgcagtccgaaggcatcagcctcaagcagtggttcgccgatgacgccgagcgcgtcgagaagctgagcttcgacgcgggcgacctgcacttcgacctgtccaagaacctgatcaagccggaaaccctgcagctgttcgcagacctcgccaaggccgtcaagctcgacgagcgcaccaaggccatgtacaccggcgtgcacatcaacaacaccgaagaccgcgccgtgctgcacaccgcactgcgccgcccggccgaagacgaaggcaagtacatcgttgacggacaggacaccgtcaaggacgtgcgcgaagtgctcggccgcatctacgcattcgccgacaaggttcgctccggcgaatggaccggcgtttccggcaagaagatcgaaaccgtcgtcaacatcggcatcggcggttccgacctgggtcccgtcatggtgtacgaagcgctgaagccgtacgctgacgcaggcatctccgcacgctacatctccaacatcgacccgaacgatctggctgaaaagaccaagggcctcgacccggagaccaccctgttcatcgtcgtttccaagaccttcaccaccctggaaaccctgaccaacgctcgcgaagcccgcacctggctgctcgacgccctcaaggccgccggcgcagtcgacggctccgacgagaagaacgccgaagccatcaagaagcacttcgtcgccgtctccaccaacctggagaaggtcgctgagttcggcatcgacccggccaacgccttcggcttctggaactgggttggcggccgctactccgtggacgcagccgtcggcacctccctcgccgtggtgttcggaccggaacgtttcgaagagttcctgcacggcttccatgagatcgacgaatacttcgccaacaccccgttcgagaagaacgtggtcgtgctgctcggcatgctgaacgtgtggtaccgcaacttcttcaaggtcgcatcccacgccgtgctgccgtacgaccagtacctgcaccgcttcccggcctacctgcagcagctgaccatggaatccaacggcaagtccgtgcgttgggacggcaccccggtcacctccgaaaccggcgaaatcttctggggcgagccgggcaccaacggccagcacgccttctaccagctgatccatcagggcacccagctgatcccggccgacttcatcgcgttcgtgaacaccccgaacccgaccaaggacggcgaccaggacgtgcacgagctgttcctcggcaactacttcgcacagaccaaggctctcgccttcggcaagaccgctgacgaagtgcgtgcagagggcactccggaagagatcgttccggcccgcgtgttcaccggcaaccgcccgaccacctccatcttcggcgtggcactgaccccgttcgcactcggcgagcttatcgccctgtacgagcacatcaccttcgttgaaggcaccgtgtggggtctggactcctacgatcagtggggcgtcgaactgggcaagcagctcgccaagcagatcaccccggccatctcccaggatgacgaagcactggccgctcaggacgcttccactcagtccctgatccagttctaccgcgcaaatcgcaagttctgatttctctaaggattaaatagccttcgaaagggctctgcacgggatgcagagccctttttgctacccctggccatcttcaaaaggtctggcgggtgaggtatttttgaatattgctgtgccgggattcaggacgccgcataatcctgattcccttcgggtccagccgagaacaatcgcaagattgaacggaatgttgcacaaacgcaagttaccgtgattttcggcggattggcaatccttcgcaggcagacctgcggagaacatacgaggcagaacgaaattgaaaaatcgtgaagcccttacctgtgcgctgatatgcggcggcgactcgaggaaacacaatggttaacgctattgaggcatttgacgccaagcacatgaagccggccgaggaaatcccggcattccgtccgggtgacaccgttgaagtcaacgtgaagatccaggaaggcaacaactcccgtatccaggccttcaccggcgttgtgatcgctcgtcagggcggcggcgtccgtgagaccttcgttgttcgtaagatcagcttcggcaccggtgtggagcgtcgcttcccgctgcactccccggtcatcgactccatcaaggtggtccgcaagggccgtgtgcgtcgcgccaagctgtactacctgcgcaacctgcgcggtaaggccgctcgtatcgttgagcgccgcgacaactccgagaagtgagtttcaaacgcaaataaagcgtgaaattggccctcagcctcacggcaggagggcctttttctattctagaccgctatgataggggtcagtgtgcaaaccggacgataaaggaatcatgtatgaggcatgccaaagaagaaaacaatagcggcgacagctttggcttgcgcgacaccttggtctggtgcggaattcctattattatcgtgctgctgatacgcattttcctgctcggattctacgtgattccctctggatccatgatgaacaccatcgaaccaggtgaccgcgtgatcacctcgaaactcaccccgaaagtcttcgatctgaaacgcggcgacgtggtggtgttcaaggatcccgaccactggctgcggcaggaagacagcagcaaactcggcggtgactacctcatcaaacggctcatcggattgccaggagacaccgtggcatgcgaagggccaggtaagccgatcaccatcaatggtgtggcgattgacgaaagcgcatacattcgccccgacgtggatcccagctcattcgcgttcaacgtgaccgtgaccgaaggacacgtgttcgttatgggcgacaatcgcgccaattccgccgattcacgctatcatcagggtgattcctcacatggacttgtgcctattcccgacgtagtgggtgtcggactcgcgaaatattggccgttgaaccgcatcggcgggctcgatgcgcaccatgaagtgtttgccgacgttccggaaggaggctcggcggcctgatggcggtttccgtaattcccacattggatttggaacgtgctattgccgaacaaggctacgatgtgatcgtcggctttgacgaagtggggcgtggatctctcgcagggccggtaatggttggtgcggctgcgatttgggcgcgtgacttagacgggccggctggagcttcgcaaggaggctcgcaagaatcttcgcatctggaagtgccgaaaggcgtggccgactccaaaatgctgaccgaacacaagcgcgaagccatcttcgacgaactcaaatcctggtgcgcatcttgggcggttggcgccgccagcaacaaggagattgacgagtggggcatttcccatgcactcggcgtagccgcgttacgtgcgttggcacaggcggaggcgaagctcggcattgacggcaacggcatgctctccggcaaaccggtgaaggtcggcgcgatcctcgacggaccgaacgattacatcaccaagacgctgaacaccttcgacgcgcccgaagtgccggtgccggcgaacgttaccaccaaagtgaaaggcgaccggtattgcgtcgccgtggccgctgccgcggtcatcgccaaagtcacccgggatcggctcatggtcgaactgggagcgcaaccccaatatgaaccatatgaatgggcccacaacaagggttacggttcggccgcacaccgtgacgccatcgctgaattcgggcccagcgacctgcaccgcctgtcctggcacctcgtctgacatacggcatctcatccgcagtccgcgattacgctaatccttgcggatgatgcatgccggaaggaaacctgtaagttcatcccgccgtctgatggccggggccaatccgtttccgtaccgtaggaaacatggaacacatacttcaggcgaccgatctggtcatggattattcgacccaacaggcgacaccaaacgccacacacatgctggcgctcaatcacgtggatttcggcatccaggcaggcgaaagcatcgcggtcatgggaccgtccggttccggcaaatcgacgttactgcacgcactcgccggcatcatcaccccgacagccggcaatgtgatgtttcgcggtgccaacctagtgcggttgagcgacgctgaccgcaccaaactgcgcagcagcgcctttggcttcgtcttccaatccggacaactgctgccggaactgccggccatcgaaaacatcgcgttgccgatgatgctgggcggcgcaagctaccagcaggccaccgacatggccatgctatggctggaacgattgggattgcgccagctcgcgcaacaacgtcccggcgaaatgagcggcggccagatgcagcgcatcgccatcgcacgtgcgctcgccgcgcagccggcagtcatcttcgccgatgaaccgaccggcgcgctcgaccagaccaccggccacgaaatcatgagcattctcatgcggaccgcacgacagaccggcgcggccgtggtcgtggtgacgcacgattcgaacgtggccgcattttgcgatgccaccgttaccatgcgtgatggcaggttgagctcgccgcagcaatcccaacctaccgccggaggcgcacgatgaacatgttccgattatggcgattgttccaccgctccggcacccgcggcacatccggccgcacctctgcgctggccatcgttgccttcgcatccgccaccgccgtcttcctaaccgtgctcggaggcctgcatggcttcatctggcgggcctccgccgaccacacgttcggttgcatgatcgattccaacaggtgcgcgcccggtacatacgaaacatggtccaaagccctggcgcacgccgacaagctcgtcgccacggtcggcgacggccattggacggccgaccaggccacagccgtcatgaacacctattccgacggctatgtgatgctcgccgcattcgccagtctgctactcatcgtgccgttcgtggcgctcgccggctcggcggcccgtctcgcggcctcccgcagggacgcacgtctcgccgcactgcgacttgcgggcgccaccaccgcgcaggtcacgaaactcaccgcgctcgatgcgggtggccaggctctgcttggcgcgctggtcggcatggccggctacttcgcgctgataccggcgatcatgctgctcgacttccaaaaccagcatttcaccttcgaacagttgtgggtgggactgcctgccctggcggctgtgaccgtcggagtcacgctgcttgccttggtctccgcgctggccgccctacgccgcgtggccttcaccccgcttggcgtgacgcaacgtaccggacaacccatgccgtccgcatggcgcgcactgattttccttgccgtgttggccgtaggctacctgctgctcaacagcatctccgcattcgcgcacttgggtcagatggtggtctacgccatcatcttcggcgtcttcttcctcggcttcgccatggtgaacgtcgtcggtacctgggtggtggcgatgcgcgccagatcgcgtgcgaaacacccgaaggacgcggccactatgattgccatgcgccgtatcctcgacaatcccaagcgtgcttggcgcaacgtgtccggcgtggcgctcgctgtgttcatcgcggggatgacgtcggtgtgcggattgctcgccaccggaatcggaggcaaccacgacccgttcgacccatctatgctgtacatgcgcgatatagcgatgggtggtttcctgacgctcgcctttgccgcggtgctcgccgccgtcagttccggcgtgatgcagacgagcaacgtctacgaccaggccgacgagtaccgcatgcttgcgttggaaggcacggatgaggcgacgctcgacaaggcacgcatgatggaagtgatcaccccgctcaacacggtgatggccgtttcattagggtgctcggtgttgttgctgtttccgattctggcaacgtcgttgctcaatccggcttcgttgcttacgttggccgcgggaatcggcttgtgttatgcgctgatggtgctcggagggtgtgccgcgaatcatgcggcgcacgggctcggtcatgccggctaccgtacggacgattgatggtctcgccgcggcggtcgtggataccgcggcgaggactggcgaggtcagccgagcagcaccgcgatgattgcgatgaagatcggtgaggtcagtgtcgagaagagaatgccgtcgcgtgcgaacgagagacccacgttgtaccgcgccgcgtagttgtagacgttctgcccggtcggcagggcggcgagcaccacgcacgcgtacaatgtggcgccgcggaagcccatcacgaaatacgacagcaggaacgcgataattggcatcacgatgttcttcaataccgccaccgtgaacaccgcgggaatattcgacttgtcctgcagcggcttcgtgccgtgcaacgacatgccgaatgccatcaaaatcattggcactgcggaatcgccgatcatgtcgatcggatcgtaaatacagtccggcaccacgaaatgaccggtttttgcggaaatcgcggatacggcgatgcccagcagcgaaccgataagcagcggctgatgcagcggctgcttcagaatctccctcgtggagaccttgcctttggtggtcacatcgagcacggtcaggccgatcggtgtgaacaccgcctgttgcatgaccagaatcggcgcgaccaaagcgggattgcccagaatgtacgtggcgatcggcagaccgatgttgttggagttcagatacagcgaattcaacgcgccgatggtggcatccgccgccttcagatggaagaacagcctattgaggatcagaaacaccaatccgaccagcacggccgagaagaacgccacaacaatggaggagtggaatatctcgaagattctctccttggacaggatggcaaacatcaggcacgggctcgatacgaaaaagctgaacctgttgagcaccatctgcgcggtaggtccgcctatgcgcatgcgcgcggccacgtaaccggtgccgatgacgatgccaatgacgcagaagccttccaatgcgcttaacagaccaggcatgacactcttcctttcgctctcggccgttggtttggccgctatccagtgttgcaccatgcatatggataacatccgatccgtctcaaaagcgttgtcgaacggcgatgtcggttccggtggtgctggataatgggcggtatgaacgaacttgagattggattttccgcttccgccaccaggcaggagcagctgaacgagctgatgacccagatcatgggaacctattccgtgagcgacgacgaagggccgttgactgacgcggtcgaagcgtttttgaataaacagcagcatctgacagtgcgcaggcatggcgatacgctggtcgcatccacgaattttgggcgtgagcgtcgcgtgatcctcgccgggcatctcgacacggtgccggtgatcgacaatttcccgccgcgttggctggaaccgggcgatccgctgattcgcgaggatgttgccgccggccatgggcgggagcgcgtgatatgggggcgcggtgccaccgatatgaagggctccgacgcggtgatgatgtatttggcggccgcgttgacggatgcgaaatacgatctgacatacgtgttctacgaccacgaagaggttgccgccgaaaagaacggcctacgcaaggtggtcgaggcgcatcctgattggatttccggcgattttgcgattatcggggagccaaccgattgcggtattgaaggcggctgcaatggcacgatgcgtttcgacgtgatcacgcacggcattgcggcgcattcggcgcgtgcgtggatgggtaggaacgccatccacgcggccgctgagattctgagccggctgaacgcttatgaaaatcgtgcgattgaagtggatggcctgacgtatcaggaaggcctgaatgccacgctgatttcgggcggcaaaggtacgaatgtgatccccgacgaatgccgcgtgcatgtcaactaccgttttgcccccgacaagtcgttggctgaggcgaaggcgctgatgattggcgcggatgccggtgcggaattgggcaatggcgagcatgttgccacaggtggcgtattcgaaggcttcggcattgaaatgaaggacgagtcaccttccgcacgtccggggttgacgtcgccgctcgcgcagtcgctggtggaattggtgcgcgagcgcacggggcgtgagcctctggccaagcttggctggacggatgtggcgcgattctcgatgctgggcattcccgcggtgaatctgggtgcgggcagtccgttgctggcgcacaagcatgacgagcagctgccggaatcggatctgctgctgatggccaacttgcttgaagactggctgaagtagctgtctgctgcctttttctgcctcctgtttctgcctgctatcggctgtttgttgttttccgtcttctgtctgcacaagtcggatcggctgtctgcacgagtcgtaatctgtgtctgcatttctcgcgaatcgtgatttctttcgacttgtgtagacggagcaacgacttgtgtagacggggcctgggatttgcgggcggggaaagcaggcggtgagttgcaggatccggaaaatttcccgtcatgtcacgttccgttgttttttgtgtcatacttatagacggtggttctgcaaatcaccaatgcatccgatggcgttgatcccctcgcgtgaagttcatgtgtgtccgcgagcgctggtgtccgccgtcgcatgatgaggacttttgacggaagttgcttcctacgggcgccatgatgcgcggccacggtgagagcgtggtgtgagaaccgtatgaggcctaagcgtgggcggcgcgattgcagcgtgtcgtcgaggagccattgtgcctaataccagtgagggcttcgatcaggtcgaagcttcggcatcgcctgagcatgccgtgaatgttgttaaattcgagtcggtccagtccgatcctgccccgcgtcgccgtcgtggcggtcgtcgcgtggtgcgtggcgtgggagctgccggtgcgtccttggagttgaaggtcgaggagcatgcttcggctccgctgttcgaggagccgaagttgccggttgcgcaacctgcgcatgataccggtgattccgctgattccgagggtatgacccgtccgacccgtcgccgtcgtcgtccggtccagtccgatgatgatgttcgtgagattgccgacgaacggccgacgcgttctcgtcgccgtcgttcggtgcaggttgaggatgagcaggacgaggatcgtccgtcgcgtcgtcgcagccgtttcgccgatgatgcggatgagtacgatgagatgccgcgtcgtcgcgcttccgtcgatgattcccatgatgaggagtcgtctgtggagcgtgccttggatgccgtcgatatgttgccggaaggccatgaggtccgccacaatccgcgtccgatgatgtctctgcttttccaggagccggttttgccgtccgttgcggattcccgagacagggcagacgacgatcgcgacgattcccgtaatgaccgcggcgagcgtaatgatcgcaatacgcaggaccatgacgatgagcaggatgaggatcgtccgtcacgtcgccgtcgccgccgcaatcgcgacgttgccgacgaagagcgttccgaagacaatcgcaatgaacgcgataatcgggataatcgcaatgatgatgcggacaatgacgaggaaggcggatctcgcaagtcgcgtcgttcccgtcgtttgaacgcgcaggagcgtcgtgccgcagctgaagtcgaacagatcgaagaggatttgatcctcgacgatattacgtatgcgccgattgatgacgaaacccgcaatcgtaatgatgatgatgacgacgagcagccgacgcgcacccgtcgtcgccgtcgcagccgcggcaatcgtgaggaagccgacgaacagcagcgggatagcgatgaaggcgagtcccgtcgtcgccgtgaggacgatgacgaggatgaaggcacggtgacccgtcgccgtcgtcgccgtcgtggcggtgcgaagacggatgaggcggaagagccgctcgtgcgtcgttcccgcaagcagcagtacatcgacgagatcaccgacgtcgaaggttccacccgacttgaggccaagaagcagcgtcgccgtgacaatcgccgtgagcgcagccgtcaaagccagctcatggagcaggacttcctggctcgccgcgagcatgtcgaccgcctgatggtggtgcgcgaacgcgaacgccacacgcagatttccgtgatcgaagacaatgtgctcgtcgaacattacgtgtccgacattcaggaagtcgccactgtgggcaacatctatctgggccgcgtgcagaacgtgctgccgagcatggaagccgcgttcgtcgacattggtcaggcgcgtaacggcgtgctctatgcgggtgaggtgaactgggattccgcacggttggaaggccagcctcgccgcatcgaactcgcgttcaagtcgggggacccggtgctcgtgcaggtcaccaaggatccgatcggacataagggtgcgcgactgacctcgcaggtcacccttgcgggccgtttcctggtgctcgtgccatccggtggcatgacgggcgtgagccgcaagctcagcgagcgtgaacgttcccgcctgaagaacatcgtgtcgaaggtcgcgccgaaagacatgggcgtgatcattcgtaccgcagcggaaggcgcctccgaagaggcgatcaccaaggatcttgaaagcctggtgcgccagtgggaacgcatcacctccaagcgagacgaattcctgcacggcaagcgtccgaagctgctgcaaggcgagccggacgtggcgatccgcgtggtgcgagacatcttcaacgacgacttctccaagatgatcgttgaaggtgaccgcgtgtacggccgtatcgaggaatacctcgacaccatggctcccgacttgaaagacaagctcgaaaagtgggatccggccgaacatgaaggcaaagacgtgttcgacaagtggcagatcgactcccagctgcgcaagggcatggaacgtcaggtctacctgccgtcgggcggctcgatcgtgatcgaccgcaccgaagccatgaccaccatcgacgtgaataccggccgtttcatcggccgcggcaagagtcttgaggagacggtgacccgctgcaacctcgaagcttccgaagagatcgcacgtcagctgcgcctgcgtgatatcggcggcatggtgatgatcgacttcgtcgacatggtcatgccagccaaccgtgatctggtgctgcgcagactggtggaatgcctggcccgcgaccgtaccaagcatcaggtggccgaagtcacctcgcttggcttggtgcagatgacgcgaaagcgcatcggacagggcttggtggaggctttctccgaggaatgcccgacctgcaagggccgtggattcattcttcatgacgagccgaccgtgtccgcggattatgacgatccgtacgccctgaagggcggcgacccgttcgtcaaaaccaacaagcatggtcacggcacggacgtgcaggtgccgaaaggctcctcgccggacgtgaaggccaaactcgcgcagatcgcggcggctgccgtggccgccaacaatgcggaactgggcgaggaagcatagaagaataaatgattattccggtctgtcaacctgacacgccggaaacagacttgcggttgtacgcgggtatgtgtagattagattgctggtgtctggccgcgaggctcgaacgtgccgggcagtaagctttccaagttaataaaggaacggatatgtacgcgattgtgaaggccggcggccatcaggaaaaggttgaggtcggtgacgtcatctacgtcaaccgtctcgaggctaagaagggcgaaaccgtggaattcccggttgctctcgttgtggacggctccaaggttgtcctcggtgccaaggatctcgccaacgtcagcgtcaaggctgaggttgtcaacgatgaggccaagggtccgaagatcagcatcatgaagtataagaacaagaccggcgttgctcgtcgcaagggccatcgccagcagctgaccgctgtcaagatcacggctatcgcctgattggcgcagggttagagtcaaggaccgaaaggaacagacatggcacataagaagggcgcgtccagctcgcgcaacggtcgcgattcaaacgcgcaatacctcggtgtgaagaagttcggcggcgaagccgtcgtggccggcaacatcatcgttcgtcagcgtggcaccaagttccacccgggtgagaacgtcggcatgggcaaggaccacaccctgttcgccctcaaggacggcagcgtgaagttcggcgtgcgtcgtgaccgcaaggtcgtcgacgtgattgccgcctgaaatacgcgcaattaacgcttacaagataaagccgcgcccgttatggacgcggcttttctttattttgatgattgctgaggattggtttccttcagcccgtcccaaacgtcacgtaacgttgcatacagttgcataagacatatcaaacggacaataatcggaccgtttcgaacaaacgattaaggtagatacatgagtgatttcgtcgatcgcgtgaccgtccatgtgaagggcggcgacggcggcaacggttccgccggcatccgtagggaaaaatacaagccgttggcgggaccgaacggtggcaacggcggtgatggcggttccgtgatcttcatggccgaccagaacgccaacagcctgttggattaccgtttcatgccccaccgcgaggctggaagcggcaccatgggcttgggagacaccaaagacggttcgaaaggtgccgatctgatcctgcccgttcctgtgggcaccgtgattttcgaagccaaagggccgcaaggcaagcctaagcatccgggcgagcagcttgccgatcttcgccatgccggagacaagttcgtggtggcggccggcggcaacggcggtcttggcaacgccgcattggccaaccgcacccgtcgcgctccgggattcgcgttgcttggcgaaccaggcgaggaacgtgacgtcattctcgaactcaaatccatcgccgacgtggccttggtgggcttcccctccgcaggcaaatccagcctgatcgcagccatgagctccgccaagccgaaaatcgccgactatccgttcaccacgctcgtgccgaacctcggcgtggttatggccggagacatgcggtacaccatcgccgacgtaccgggcctgattccgggcgcatcccaaggcaagggcctcggccttgaattcctgcgccacatcgaacgcaccgaaatcatcgcccacgtcatcgactgtgccacgctggaacctgaccgtgatccgatgagcgactacaaggcgctcgaacatgagcttgccgaatatgccgacaagctggaactgccgttgggcgcaatcccaatccccgaacgcccccgaatcatcatcctcaacaaggtcgatatgccggaagccaaggaattggccgaattcgtcaaaccggaattcgaaaaactcggtctcaatgtgtatgtcatctccaccgcatcccacgaaggtttgaaggaactcaactgggcgttggcggccatggtcgccgacatgcgcaaggaagtcgccgaacgcgaacaggccgaagaagaagcgcgcgtggtcatcaagccgctcgaagagccgcgcaaccgccgtcgccgcaacgacgaaggcggcaccgcgcttgacttcaccgtggaacgcaaggaagccggcaacggcgacgtctggtacgaagtgctcggcaccaagccggaacgttgggtcatgcaaaccaacttcgacaacgacgaagcagtcggctacctggccgaccgcctcgccaaactcggtgtcgaagacgagctgcgcaacaagggagccaagcctggcgacgaagtacgcatcggcaagggtgcgcgagccgtggaattcgattgggatccgaccattgctgcgggcgcggaaatgctcgacggcgcccagcttggcgcacgaggcgtcgacctgcgactgcaggaacaggacggccgttcgcagcgccgcaccaacgcggaacgccgtcgccagtaccacgaaatgatggatgcgcgccaagccgtgcgtgaagccatgatggccgaacgcaaggccggacactgggccgatccttccgtggacgacgaccgccatgacgaaaccagcctcttcggacgcggtgaaaccaccgattccgaaaacgtggaacaatagaagcagcaaaacgcccgctgatgtgccgattggcatgtcggcgggttttcttttcggccattcgaacgcctggaggaaccatgaacacgccatcgcaagcccaagtgcgccgcgccatcgccgaagcgcaaaccatcgtggtgaaagtgggatccagctcgttgaccaaaccaagtggccacctcgatccggaacgactcaacgcgctcgtggcggccctcgcacgcgtgcgactcatgggcgggcgcgtggtgctcgtctcctccggcgccatcgcagccggattcggctccctcggcttcgactcacgccccaccgacgtggctgaccagcaggcgtgcgcggccgtcggacaaggcctgctcatggcccaatacgagaacgctttctcacaatacggactgcgcgtcgggcaaatcctcatcaccgtgtccgacaccatcgcaccacagcaataccgcaacgtgcgacgcaccctcgaccggctgctcgacctcggcgcggtgccgatcatcaacgaaaacgattccctcgcgtccaacgaaatccgtttcggagacaacgaccgactctccgcattggtcgccaacatcgtagtcgccgacgctttggtgctcctcaccgacgtggacgcgctctacacggcacccccaagcgaacccggatcgcgacgcatcagctacgtgccgaacgtggaggacgcgctcgccaaagtgcaggtcggcggcaccggatcaaacgtgggtaccggcggcatggtcaccaaaatggaagcggcgcgtgttgcggcggtttccggcattcccgcagtgctcacctgcgcggcaaacgcaggcccggccatgatgggcgacccagtcggcaccgcattcgcccccatcaacgaccgtggatcatcacgccgcctatggatcgggttcgcagcacacccgcaaggcacgctcgtggccgatgccggcgcttccaatgcggtacgcggaggggccgccagcctgcttgccgccggcgtactcgaagtgcggggcgattttgccgccggagacgcggtgtggatcgacgatgaagcgggcaatcacctcgcaaaaggcctcgtaggattcgattccgaagaaatcccgcaaatgctcggccgcaataccgcccagctcaagcgtttcctcggcgaagaatacgcccaccccctagtccaccgcgacaacctcgtcttggtttaatccctttccctcttttgttcggtgccctgtaaatagcaatatgccgcccctaccggtcaacagggaaaaggaattccaaaatgtgctaaaaggctgttgtttttcgggcgggagggatagcatggcaaacatgactatggctgactggcagactctttccgaacgtattaaccgcgtggctccgagcgctactctggccgttgattccaaagcgaaagcgatgaaagctgaaggaatcgacgtcattggatttggtgcgggcgaaccgaactttccgactccggctgcgatcgtcgcggctgcggccgaagcggtgcaggatccgaagaactatcgttacactccgacggcaggtttgccggaattgcgcaaggcgatcgcagacaaaacgttgcgcgactcggggtatggagtcgatccgaatcaggtgatcgtgaccaatggcggcaagcaggccgtatacgaatcctttcaaatcctgctcaatgatggcgacgaagtcatcattccgacgccgtattggacgagctatccggaagccgtgaaactggctggaggcgtgcctgtcgaagtgttcgcgggagctgaccgcaatttcgagccaagcttggaagacctggaagcggcacgtaccgaacgtacgaaggccatcatcgtgaatacgccgaacaatccgacgggtgccgtgtggaatccggaaaccgtcaaggcgatcggcgaatgggctgtggaacaccatgtgtgggtgatctccgacgaaatctacgagcatctgaactacgatggtgcaaaaaccacgtatatcggcgctgcagtgcctgaagtgcgtgatcagctgctggtgctcaacggcgtggccaaaacctacgctatgcccggctggcgtgtcggctggatgatcgctccgctcgacgtggcgaaggccgcatccaagctgcaggggcatatgacgtcgaacgtgaacaatatctcccagcgtgccgcgatcgcagccgtgtccggatctcttgacgccgtgtacgagatgcgtgaggcgttcgacaggcgccgtcagaccatcgtcgccgcgttgaacgatatcgaaggtgtgaactgcccgacgccgaccggcgcattctatgcgttcgccgacgtgagcgcactgctgaacaagccgctcggcaccagcaaaaccgcttatgcgagcacgtccgaactggctgcggcactgcttgacgaaggtcatgtggcggccgttccaggcgaagcgttcggcgctcccggctacttgcgattctcgtacgcgcttgccgacgacgacctcgttgagggcatgaagcgtatgcagcagtgggtcgaggactgatactggcctgactgagacttttcacacgattcgcaccgcggtgacatgccgggtgcgaatctttttttcgttgaaaaatagcggttttgggacatttcttgaaaaaccggttggactaagtcgcaaatacccgctattatttcgacttggcggttttgccgcttacttcttgcgtggtttttcgcacaaaatcctcgccagcaagtagaaacggcagagtacacctagggaagtggcgcaattggtagcgcaacggtctccaaaaccgtaggttgtgggttcgagtcccgccttccctgccaagcttcttacaacaagctcagcggaggattattatggcgaaggcaaagaatagcgaaaaggccgttaagccgaacatcttcatgcgtcttggcttgttcatcaaacagattatcgacgaactccgcaaggtcgtgaccccgaccagcaaagagctgttcttctgggcactcgccgtgtttatcttcgtgctgctcctgatggcactggtcaccggcatggacttcggtctgggcaagctgaccctgtggatcttcggctgatcaacgacttgaaggtgaaactgcatgactgacgaagtgttttccgacaacctcgacgaagctccagaagctgatctcgaggccgtagctgccgttgaggcgctgcaggccgagggtgaaagcgttccggaagtcgctgaggccgagccgactgctgaagctgcttccgaagagtccgcggaggacgagggcggcgaagagctggatgctggcgccaaggccgtcgaagacttctccaacagcctgcgcaccctcgaaggcaagtggtacgtgctgcacacttactccggctatgagaagcgtgtgaagaccaacgttgaatcccgtgtggcaagcttcggcatggaagataagatcttccagattgaagttccgatggaagaagtcgaaaagcacaccgaaaagggcaagaaggtcatcacccgcgtgcgtgttcccggctatgtgctgattcgcatgcttccggatgagaacgcccgtcgtattgtgcgtgaaaccgaaggcgtcaccggcttcgtcggtccgaccaaggaaccggcgccgctgagccgcaaggaagtcgtctccatgatggctccgatgatcgcttccgaagcgctcaagaaggctggagacaagccggccgccaacaagaagcgcgtccttgaagtctcctacgccgttggcgatcaggtcaccgtcaccgacggtccgttcaccaccatggcagctgtcgtctccgacgttgagcccaccacccagaagctcacggtgctcgtgtccatcttcggtcgcgacacgccagtggagttgggcttcaaccaagtagaaaaactgtcctgataagtctttgaaagaccccgcgcattgcggggtctttttttgtctgggggagtgggcacaataggaaagcttgtgtctggagggtttggcgtgcctgaatgagggtacggaatccgctagcacagcacagcaatatacgttgcggaaggaaccggacgcgggaaacctactccggtgccgctaccaccgcttctacagaaagaagaaccatacaatggctcctaagaagaaagtctcggcgcttctcaagctccagattcaggctggcaaggccaacccggccccgccgctgggcccggcactgggttcccatggcgtgaacatcatggacttctgcaagcagtacaacgctgccacgcaggacaagatgggccaggtcatccctgttgagatcaccgttttcgaagatcgttccttcacctttattctgaagaccccgccggcggcagctctgctgaagaaggccgcgggcatccagaagggtaccgaaaacccgctgacccacaaggtcggctccgtcaccaaggctcaggtccgtgagatcgccgaaatcaagatggctgatctgtccgcacgcgacgtcgaagccggcatgaagatcatcgagggcaccgcccgctcgatgggtatcacggttaccgactgagaggagagggacaaatggtaaagcgttccaagaagtaccgcgaagcttctgagaagatcgatcgcaacaatctttacaccgctaacgaagccatcgctctcgtcaagagcatgccggagtacaagttcgatcagaccgttgaggccgtgctgcgcctgaacgtggatccgcgtaaggccgaccagctggtccgcggttccgtcaacctgccgaacggcaccggtaagaccgccaaggtcctcgtgttcgcccgtggcccgaaggccaccgaggctctcgaggctggcgccgacatcgtcggtgacgacgatctcgtgcagaaggttgccgacggcttcctggacttcgattccgtggtggctaccccggacatgatgggcaaggtcggccgcctcggccgcgtgctcggtccgcgtggcctcatgccgaacccgaagaccggcaccgtgaccatggatgtcaccaaggccatcaaggacatcaagggtggcaaggtcgacttccgtgttgacaagaatggcaacctgagcttcctcatcggcaagctctccttcaccgagcaggctctcgacgagaacttcaaggctgttgccgacgaaatcaagcgtctgaagccgtccacagtgaagggccgctacgtcaccaaggcgaccatcacctccacgatgaacccgggcgtcccggttgatccgacggtcatcgcctgagcaatatagcttgcagatagcttctatatagcttgcaaaagacccgcatcctgccccaacgcgagatgcgggtcttttcatatatatcttgcgattatctagctcatttaataaataatgatcctgcaatcgtctgactatcaaagaatctcaatgaaaccagatatcagatagatattaaaacagagaagtgatgttcaacgatcgcgcatacggccaatcgcaagcgccgtcgtcaacacgtatgcgtcacgcgggtcggtcgcatcccaaccggtcgtttccgcggcacgcttcaagcgataacgcaccgtattcggatgcacattcaattccttcgccgtgttttccaacgaactgccgttgcgcaaaaacgtggaaaccgtcacaaacgtcggatcgtcgggattctcgccatgaagcacctgatacacgttctgatacaactcttcacgagcgtaatcatcgcccaacagcgcccgttccggcagcaactcatcggcacgcaacgggcgggacggcgacgccaaagcgggagccgcctgcaaggaaaacagggtttcacgcaacacgtgcgaagcgccggcgacaccggaacgcaccggactcaaatacaccgattcgtcatctttgaaagcgggcataatcgacgtgcaggtcacttcggcagtggcggcgccactctgacagacaagcgccagcagaaaactgccgtatgtgccaacaatcacatgttctccgcccagatcgcgcaccgccttacgcgcaacgagcgaagccgaagcgggactcgtttccggtgtgccgccaatcgcgaaacaatcgaaatccccacgccaaccaagcacattcatcaacgaggcgacgcgatcatccgtaagagaagtcatcaggcattcgaaagcgagccgttcgatggttgaatcgtcggtgtgccctgccagaaggtcgagaatgtctgcctgatcggagttcataagcgtcaagtgtagccgcccaactggcgaatcgctgaacggaaagcgtcaacgaggtgaagttcattcggggagtgccgctattatgccgcttatgagcgaagtcaaacaaactggaaagcgtggcgagcgtatcggcacattcctcagctggatgctggccgtgctggcatgcctttgggtggcatggtgttgcgcgatcgggccgttgtattggttcggcgatgggctttccgacttcggctggctgaatgtgctgtatttggtggtcgctttcgcgatatggttttcgatagttgtcgcattggtcagattcggccgcggccgtcgcgtacttccgcaatatttcgcacgacggcatgaaaaactatgcaacgagattgcaggaacgccgaccaccgtgcttggcattatgttgcgacacttgcatgatgccgcgcacagccgcccagggcgcgccctgcatgcagtgatcgtatggacggggcgcaaactcatccgctgcaccgactgttggtggaaactcatgctggtgttcgtaatcggctggctgtggattccaaccacgctattggccgcgttcggcgccgacattcgctcgcagatccgtgaattcagctgggccttgaaccagtggacgggcttgaaacagccatatatcggcttcttctcgttcgtgcccatggatatttacccgaccgcgcattacatgtggccggacaatcccacatatctgaccgaccagcacaatgtcgtgctcaccgtgttctacggtgccgcagcggcggtttcgcgctacttcaccgactccaacgatgcgggcatcgtggtgctcgcagccttgcaatggctattcgccgcattctgctgttcggccaccgccaaccggttcttcaacctgccgtggcgcaggcttggcgtcggcacgttcgacttctcgcatccggaacgccacgattgctggaatatgcgcgattacgcgcatcctgaagcaggcgttgtggcacgcccctccagactgcgggccggtgcgaaaacacgattcatgatactgctgttcttcatggtgtgcccgcttgcggtattcgccacgatttccctgacgaaatcgccgctgttcgctttcgcattcgtatggtggttcggcgtgtggtacgaactgcacatgacgcatatcaaagcgctgcccaccatcaacggcaagccgacgtacctacgcaaacgctcgatcatggccttcaccatctcaagctgcgtgatgctgatcagcgcgaaatacgcgtggtacatcattctcttcaccctgatcctggcacttatcaacgatcgcaaacgttggaaaacctatcttgtggcacttctgctgccaaccatcctcattcatggcggcatcgtgttcctcaccaacacgggcaccatcatcggcggcgaccccatcgaaagccgtggcatccaactgcagcagatcgcgcgcgtcgccaaatacaatccgaaaggcattccggcggacgcggcgaaaaagcttgaaccggtcttcaacctcgaccagatggccgaagcgtacttccggcaggacgccgacccggtgaaatcctccggcatccaatcgaagaaagtcagttacaagtggcgcaccgtcaccgaagacgacatgacaaacttcaacgaggcctggcttgaaatcgttgtcgcaaatcctgttatcgcgctcgacgcgtttttcgccgaatgcttcggctatttcgacgtgaccgacctgccatacgtgtcgatggactactacgtgaacaacgattacgtgcagaacgacaatgcgtggatccacctgtataaccacgattggcgcgatgcggtggccggcttcgcgaaaggttggggcaatattcccgtgatcggctgggtgacgcacggcaatctgtacgtaacgctgatgctgctggtcggcgctgccgaagtggtgttgcggcgatggcgctcgctgtcatggcatctgcccctgctgctgctcatgggcgtgatgatcaccgctccggccaacaatttcgaacggcatatgctaccggtcgcgttcgtattcggtttcgtatgcctgcaattctggcgcgagtcgcgtaatgcgcgatcggctgccagcgcgaacgtggccagtgcgcatgaggccagccaggtgcggcaggacgagtagcggctgcgttggctgctgcatgagctgttgcgttgcggcgacattgcgtcggcgcgccgcgctgtagtaggtaggaggtaatgatggcgattttggattcggctgcgatcatgccgcgtacatgcgttgcggcggatcaggtgcttgttttggatacggtgggatccaccaacacgtatgccgcggatttggtgcgtgcaggtcggctgttcggcatggatggcatggacggcattgcagggaacctcgtgtggagcgggcgtgagatcgtggttgtcgcggcgaacgagcagacggccggtcgcgggcggctcgaccatacgtgggccagtgtgccgggggagtcattcatcgtgtcgctggtggtgagcgtgccggttgcgattgtgcgcgattcgtccgtcaatggttggctgcagatgattgccggttgcgagatgcgtgaggcgattgttggtgcggtatgcgatttcggcggcacgctcgatgaagatgttttgctgaaatggccgaacgatatttttgctggcggcaagaaacttggtggcgtactcgctgaaatggtgccgattccggattgcggggatcgcgttgccattgtgatcggcgtcggtttgaatcttgccgtcgctcaggaacgattgccgatagataagtccacatcgttgcagttggttgcgcgcaatctgcctgatgcgatggtgttgcgcgatgcgattgccgtacgttgggtgcaaggattgcgctcgcggttggctgatttcgaagaggaccctcaccgtgaggctgtgcgcgcccgggaagcgatgaccccgatctgctggacgctcggcaagcagtgcgaggctcattttgtggacggaaccactttgcagggcagggctgtcgcgttaaacgacgacgcctccctgaccattgaggatcaggaaggcgtattgcatcgggtgagcacggccgacgtaggcgtgctcagtaagtaaaaaattacttgattgctgaaatttgccgcaatctcacttcagcttggcaagacctgcgaccacggcggaagcgataacggccttgaccgcatcgcctgcgacgaatcccatggaagccacggccacaatcggcagtgcgatgccggtaatggcggactgcacgatgaaaccaagcagatagtcaagcgcaatgcagccggcgacacaggcaaacaggtaacgtgcggcggtcagcgcgccatgcttcagcgaatcggtgcgcgcctcacccttcagcagcgacgtgacgatggccgccggcaggaagccgatcaggaagccggcgctcgggccaaccaatgccatggtggaagcgccgccggcgaacaccggcagaccgaccgcgccggcttccagatacatgagcatcgcggcgccggcctgcttccacggcagcatcagcgcggccagcatcaccacgaacgtctgtagcgtgatcggcaccggcgtgcccggaatcggcacggcaccggccgcggaggcggtccacatgagcacggcgaacagcgccggcttgaggatggatccgacagtgccgctggtggcggttttcagcgtggttttgagtgtcagcattgcgttacgcacgataattctccttggatgtgattgcattacgttgatgaatcgacgattgttgacagccgaaatgatggcaagcgcgaaagtgacgaaaatgcaaggtttgtcaacttatgcccccaatcgtaggcttgccaagtttcggtaacgtttgtggagccttacaaaaagattgcgtgtcttttgtgggaaacgagttcacgatttttcgttcgcgcgaccaaacttgacgttatgcctaaaaatgtcaacaaacttctggtggcgaatcgcggagaaatcgcgcttcgcgtagtgcgcaccgcccgtgagatggggattcccacggttgcggtgtacgcggagcaggatcgccatgcacaatacgtgcagatggctgacgacgcatatctgctttccggagacacgtataaagacacctatctcaacgaggatctgctgatcgacattctgcagcgcagcggtgccgacgcagtgcatccaggctacggattcctttccgaagtggccactttcgcacagaaagtgatcgatgcgggtgcggcttgggttggtccgaatccgaaagccctcgtggatttgggggataagatcaccgcacgtcgtgtggccacgttcgccaaagttccgccggttcccggcatttcccagtcgatttccgacatgcgattgctgctggatttcgcgcatacgcacggttatccgctcatgcttaagcgtaccgatggcggcggcggtcgcggcatcacgctcgtgcacaacgatgacgagctgcgcggtttctacatgaatcatgatgcgctgcagggcggtgatctgaacgaatatttcgtggaacgattcatcgacaaaggacgtcacgtcgaaacgcagtgcggccgcgactcgcacggcaacttcaccgtgtattccacgcgcgactgctccgtgcagcgccgcaatcagaagcttgtcgaagaggcgccggcaccgttcctttcctccgaggtgaccgaccagctggaaacctactctcgccgactgttcgaagccgtcgattacgaggggcttggcacctgcgaattcatggtgaccgaacagggcaaagtgtacttcctggaagtcaatccgcgtctgcaggtggagcataccgtcagcgaggaggtctgcggacttgacctggtgcgcgagcagctgaccatcgccaacggtggggaactgaccgtgaaccatccgcttcgtggacacagttttgaactgcgcctgacctgcgaggatccggcgaagaacctcgcgccaagctccggcacgctggcctcgttgcgctggccgttcggcccgggcatccgtgtggattccggcgtggtcgaaggcgacaccatttcgccgaaattcgattcgatgatgggcaaactcgtggtcaccgcatctgaccgagcggcagcagtggcccgcgtgcgccgcgccttgagcgagctgaaggtggaaggcgtgccgactccggcaagcttgttcgaacagattttcaacgacgacgaattcaccgccgaacacggtgttgcatacgatgtcagcaccaaatggctggaacgcaagtacctcaacaaggaagccgcatcatcgcaaggcgggcagccggcgtccatgtctggcgcttccgaggtcgacaagaaggaatccagcgaaaccttcgtcatcgaagtcaacaatcgcagagtgtcgctgaccgtgccgaacgacatcgtcgccaacctgacgggcggtgccaaagctcgtgacgcgaaacgtgccatccagccgctgcgtgggcagggactgcatcatgcgcagaaaaaacagcaaagcaacgacggccaatccggtgtgatcgcaagcccgatgcaggccgtcgtgacgcgtatcaatgtggccgaaggccagcaggtggccaagggcgacctgctcgtcgtgctcgaatccatgaagatggaaaactacgtgtatgcgccggtcaagggcgctgtcaccaagattttcgtgggacccgcggcgggcgtggaagccggcgaaacgttgatgaccatcgacgtgaccggagcgaacggtacgaaagccggcgaaaacggcgcaactggcgctgctgttgacggaaccgcaaccgacggaactatggaagggggtaagtgatgactgatatcatcgcaagcccggccgtcaaagaagccgtgaagatcgtaatggagcagcaggagcgactcggcaaaaacgcggccgaagccgtctccgcggccgacctgccgggcgcatcccagccaatccgcgcatccgtgcttcgtgcggcgcaactcgcgcacgaagcggaagatcatgcccgcaatcgccagcatgtcaaagacaaactgacggcgcgcgaacgtcttgacctgctgcttgacaccggttccttcgaggaaatcggacgattctgcggcggcgacatcaacggcggacgcgcgggagcggcggtcatcaccggtttcggcgaagtgttcggacgcaaagtggccgtatacgcacaggacttttccgtgcgcggcggcacgctgggagtcgcggaaggccgcaagatctgccgattgatggacaaagcgctcgacttgaaagtgccgatcatcgcgcttatcgattcgggcggcgcccgcattcaagagggcgtggccgcgctgacgcaatacgggcatctgttccgtaaaacctgcgacgccagcggtttcgtgccgcagctctcgctgattctcggcccatgcgcgggtggagccgtgtactgcccggcactgaccgatctgatcatcatgacccgtgaaaactccaacatgttcgtcaccggtcctgacgtggtcaaagcggccacaggcgaagtgatcagcatggacgacctcggcggcggatatgtgcacaacgccacctccggtgtggcgcactacctgggcgaagacgaagccgacgcgatcgactacgcacgaaccgtgctcgcctacctgccgtccaactccgacctgcagccgcccacctacgcgtacgccgcaacccgcgccgaccgtgacgtggccaagcgacttgccaccatcgtgccggacaacgaccgccagccgtacgacgtgctcgacgtgatccgctgcatcgtggactacggcgaattcgtgcaggtgcacgagctgttcgcaagctccgcagtggtgggattcgcctgcgtgaacgggcatccggtcggcattgtggcaaaccagccgaacgtcaacgcgggcatccttgacgtggattcctccgaaaaagtggcacgattcgtgcgtctgtgcgacgcgttcaacctgccggtcgtcaccttggtggacacccccggatacaagcctggcgccgaacaggaacatgcgggcatcatccgccgcggcgcgaaagtgatctacgcctacgccaacgcgcaagtgccgctggtcaccgtgatcctacgcaaagccttcggcggagcctatatcgtgatgggatccaaagccatcggagccgacctcaactacgcgtggccatccagccaaatcgcagtgctcggcgcggccggagcggtgaacatcatccaccgcaaagacctgcagaaagccaaagacgcaggcaaagacgtcgaagcgctccgagccaaatacgtggccgactacgaacgcaccaccgtcaacgcgaatctatcgctggaaatgggcgaaatcgacgccatgatcgaccccgagcaaacccgcgaaaccatcatcgaatcgctcaaactgctctccagcaagaaacgcgtgcgcaaaaccaccaaacaccacggcaaccagccgttgtgacgggcgcaaagtgcgcggatgaatcgtaagcaaacgtaaacgcaagaacacatcgcaagatttttgaaacaagtaaggaacatcatgaacaccttttttcttgaccgactgaacagcgagccgcacgcactcgccttcgcaggccaatccaccccatggccggtgacgctcgccgaccagagcgccaatccggtgctcgacgaagccctgcatacccacgccgacgcagcccaggcactgctgtacccggtgtcagccgacctgctcgccaccaccgggcgcccggtcgacctgtttggattcgaaccgaatccggcgcgacttggcgctgccgcagcggcttccgccagcgttccgggcattgctctcgcccagttgggtgcgctgctcgatgctgcttccctcggctacaatcccgccgttgccaagccggttgccgtgctcggtcactcccaaggcgtgctcgccgtgcacatggtgcaggcgatcgtcgaagcgggttccattgaggcggcttccgcgcaaatcgatgaaattcttgcgattgccacgctgatcggcgttgccggcacccgtcaggcgcgtcagcttggccttgccgcacgtcacggcgaagccacgccgatgctgtctgtcaaggacatcacccgcgcccaggtggatgcgctgatcaagcgtgtttccggtgcccgaggcccgatcgccgtggcagtcaccaattccgccacgcattatgtgctctccggctacccggaggatctggccgcgttcggcgtggaagtggccaaggagcacaagcaccaggccaagctgcgcgaagagaaggtgcgtggcggtcgcgtgttcgaaccggtgctcgaataccttgacgtgaccctgccgttccacagcccgcttatggccgaggctgtttcacaggctgtttcatgggcggaatcctgcggaatcaacgccgaccacgctcgcgagctcgccgccgaagtgctgctcaaccatgtggattgggccgcacgcgtgcgtgcgctcatgaaatccaccgatccgagcgccctgtgggtgttggactttggcccgggaaccaccgtcggcaagctgttctccaccgttgcccaaggcaccggcgtcggcgtggtggaagcctccaccgtggccgatcgtggcgcgctttccacgctggaaaccctgccggagcgcacccagaactggacccgcttcgcaccaagcatcatccacacctccgccggagacaaggtgcgtaccgcattcaccgaactgaccggcaaagcgccggtgctgctcgccggcatgaccccgaccaccgtggaaccggaaatcgtggcggcggccgccaacgccggctactgggcggaactcgcaggcggcggtcaggtgaccgccagcgtgttcgaccgtcatgtcgccaagctggaagaagagcttgaagaaggccgtaccgttgaattcaacgcgatgttcatggaccgctacctgtggaacctgcagttcggatcccagcgcatcgtaccgaagaagcgtgccagcggcaccccgatcgacggcgtggtcgtgtccgcgggcattccggaacttgacgaggccgtggaactcatccacactctcaacgccgacggattcccgtacgtgagcttcaagccgggcaccgtcgaccagattcgccaggtggtgcgcatcgccaaggccgtcgctccggtcaaggtgctcatcgaagtcgaaggtggttccgcaggtggacaccattcgtgggaatcattggacgatctgctgctgagcacctatgccgaagtgcgtgaacaggccaatctggtgctcgtggtcggcggcggcatcggcacgccggaacgcggagccgactacatcaccggcgaatggtccgccgaatacggtcgcccgctcatgccggtggacggcgtgcttgtcggcaccgccgtgatgaccgccaaagaggcgcacaccagccctgaagtcaagcagatgctcgtcaacaccccaggcattcccgccaagggagcagacgtcgatccgttcgctccgctgggcgaacagtgggtgccgagcggccaagccaagggtggagtcacctccggcctgagccacctgcatgccgatatttacgagctggaaaactcttccgcgcgttgcggacgcctgctggtgcgcgtgatgaagcatccggaagagctggaaagccgccgtgaggaaatcatcgatgcgttgaacgccaccgcgaagccgtatttcggtgacctgaaggccatgacctatctcgcatgggcacagcgtttcgccgatctcgctttcccgtgggtagatgaaacctatgccgatcgcttcctgcacttgctacagcgtatcgaagcccgcgtcaccacgaaggaaagcggcgaattcgcatcgctgttcgcatcccgtgccgatgtggaatccgatccgcatgcggccatcgccaagcttgccgaagcctatccgcaagctgatgaactgaccgtcaccccgatggatgaagcttggttcccggtgctcgtgcgtgaatacccgaagccaatgccgttcgtgcccgtcatcgacaacgacctgctgcgttggtggggtcaggatcagctgtggcagtccgaagactcccgttactccgccgattccgtgcgtattattcctggtccgatctccgttgcgggcatcaccaccgttgacgaaccggtcgccgacattcttggccgtttcgaagaggccatggtcaagcgcgtttccgccgaatcgccaagcgcagacaaaaccgcgtttgcccagctcggcgcggcatcttccgcagaagaattcattcgcaaatccccgaacatctcgtgggtgggccatctcatggcaaacccggcgtacggtaccagcaacggtgacgccaactacgaaatccgcaagatttccagcgaaggaagcatcgaaaagtacgatctcgacattcatctcgatacctactgggacaacgatcctgacggtggcgcatccaagcacgccgtacgcgacatcgtcattccgctgaacgtggacggcaacgaatccgggctcttcccggtggtcgaccgcgaccgcctgccggaacacgtgtaccgcatgcttgccgacaccgcgggcatcggcaataccgccatcaccggcgacaagctcaccgccatgcccgttattgagcaggtggcagacaaagccgcccatccgttcggacaggcgcataccagctacacgctgtccgccaacctcggcttcgaccatgaagcggccaccggcggcgcgctgccgagcaatctggtgccgtcgcgcatcgcaccggacgcactcgtcggaccggcatggcccgccatctacgcggccctcggatccgtatacgtcaacggcttcccggtgatcgaaggcctgctcaacgcagtgcatctcgaccatctcatcgaactggaagtcagcgaagacgagctgctcaagcacactggcgaacagatcgcactgaccagctgggccgaaaactacttcgaatcggcatccggccgtgtggtgaccatccacgtcacccacagcgcacaagacggcaccgtgcttgccaacgaaaccgagcgtttcgccatccgtggccgcgcatattccgacgcactgccgccggaagcgccggactacggcggaatcgaagcggaaatcgaaagcactccgcgccgactgctgcgccgcgtcaaggtgaccgctccgcacgagatgaccgccttcgcccgtacttccggcgatttcaacccgatccacacctcgcatcgtggcgctgccgtttccggtcttgcggcaccgctcgtgcacggcatgtggctctccgcaaccgcgcaatacgcggtgcaggcgcttgacggcaagggtgcgcactacgaaatcgcaggctggacctacaacatgtacggcatggtgcagctcgacgacgaagtggaaatctccgtcgagcgtgtcggacgcgtggcacactccggcatggtgctcgaagtgaccagccgcatcgacggcaatatcgtgtctcgtggcaccgccatcgtacgtgcgccgaagtccgccttcgtctacccgggccagggcatacagcagcagggcatggtgctcgacgagcgtgccaagtccccggccgcacgagacgtgtgggagcgtgccgacaaggtgacctgcgagaagcttggattctcgatcctcgccgtcgtgcgtgacaatccgaaggaactgaccgccaacggcgtgacctaccgccatccggaaggactgctcaacctgacccagttcacgcaggtggcgctcgccaccgtggcattcgcccagaccgcacgtctgcgcgaagccggcgccgacatttggccggcctatttcgcgggccactcgctgggcgaatacaacgccctgagctccttcgccggcgtgattccgctggaaaccgtgatcgaactcgtgttccaccgcggttccaccatgcaccacctcattccgcgtgacgagaagggtcgctccaactaccgcatgggtgcgctgcgtccgaaccagttcggtgtgggcgacgacggcgtacgcgaatacgtcgaatccgtgtcgaaggcttccggcgagttcctgcagatcgtgaactacaacctggctggccagcagtatgccgtggcaggcaccatcgccggtctgaaggcgctgaaggccgattccgaccgccgcgtagccgaatatggcggcaagccggcattcatgctggtgccgggcatcgatgtgccgttccattccacgctgctgcgcaagggtgtgccggaattccgcgacaagcttgacgcgctcctgccgcagaccatcgattaccgtggtcgcttggtcggacgctacattccgaacctggttgcggctccgttcgaaatgacgaaggaattcgcggccaagattctcgaagtcgtgccgtccgagcgcattcaggccgctttggatgatccgcagatttgggattcctatgctgctgatgatcagaagctcggtcgattgctgcttacggaactgctgtcttggcagttcgcctccccggtgcgttggattgagacgcaggctctgctgttcggttccgccgagcagggcggtcttggtgtggaagagtatgttgaggttggtctcggcaatgctccgacactcgccaatcttggtgccaagacgttgcgtctgccacagtttgccggtcgcgatgtgacggtgtacaacgttggtcgcgatgagggccgcgtatatatgaccgattccgattcgttggttccggaagaagatgccgacgattctgcagttgcggctgcggcttcttctgcggctgctgctccggctgttgcctcagctcctgcggcggctcctgcagccgttgcggaagttccggttgccgcagcttccgctggcgctccgtctggtgccgccgttgcggatattccattcaaggcatccgatgcgatcgccacattgctggcttactcggccaaggttcgccccgatcagatcggcgaaagcgataccaccgatacgctgactaatggcgtgtcttcccgccgtaaccagttgcttatggacatcagctccgaactgggcgtggcttccgtggacggtgccgccgaagcgacggtcaaggcgctgagcgctttggtcaacaaggtcgctccgaactacaaggcgttcggtccggtgctgtctgacatcgtgcgcgaccgtgtgcgtggcatgttcggtgccgccggtgtgaagctcggccagatcaccaagcgtgtgaccgatacatggcagcttggtgaagggtggacttcccatgtggtggctgcgctcgtgctcgaaacccgtgagggggccagctctcgtggcggtgatcttgcctcgttgagcacggatgccgcttccaatgcggccgctgccaacgcgctgatcgatgcggccgtgcagaaggttgccgccgacaagggcatcgccgttgccatgccgagcgctggtggcgcagctggcggggctgtggttgattccgccgctttggacgcgttcgcggccaaggtgaccggtgccgatggcgtgctcgcctccacggcgaagttcgtgctgaaccagctgggcgttgccgctccggttgtcgaagaaactgctgatgagaacgcggctgttgtggctgcggtcgaagccgaactcggtgctgactggccgaagcaggtcgaacctcgttttgacgagcgcaaggccattctgttcgacgatcgttgggcatccgcacgtgaggatctggcacgcgcctactacaacaacgatgaatccgcattgaacggtagcttcatcggtctcggcaagaccattgccgacgaagccgcctggtatgcaggcaagagcgacaacgcggatctgaaggccgcattcaatcgtgtcgctgccgaagcaggagaaaacgcttccgaatcggcggaaaccagccgtttcgctggagatatcgccgtggtgacaggcgtggctccgaactccatcgcagcccaggtggtcaacggcctgcttgcaggcggtgcgaccgtggtggccacctcgcacagtttcaagccaagcgtgaaggcatgggccaagcagacctaccgtgagcatgcggccggtgacgccaagttgtggctggttcctgcgaacctgtcaagctaccgtgacgtggacgcgttggtcacttgggtcggcaatgtgcagaagaagacttccggtgcgaccaccacgattctcaaacctgcttacgagccgagcctgttcttcccgttcgcggctccgccggtgcatggcagcctcgccgattccggcgaactgttcgaatcccaggctcgcctcatgctgtggggtgttgagcgtgcgattgccggacttgcgaagatcggtgccgacaccgatgtgcagcataagttgcatgtggtgttgccgggatcgccgaaccgcggtattttcggcggcgacggtgcctacggcgaagtgaagagcgcatttgatgcgattgtgaaccgtgctcgcgccgaaaaggtgtggtcgagccgtgtgaccttcgcccatccgaagatcggctgggtgcgcggcacgggcttgatgggcggcaatgatccgctggtcgaagtggtggagcgtcacggtctgaagacctattccaccgccgaaatcgcggtagaactgctgaacctttccacccgcgaatcccgtatcgaagcagccaaggccccgctcgacgtggatctgaccggcggactcggcaacgagccgatcgacatcaaggcactgcgcgcggaagccatggaagacgcggcccaagcggaagcggcgaatgccaagaacgcaatcgcaggcaacgaatccgataccgaggccaagacgctcatcaaggcgctgccaagcccgcgtgctccgcgtcaggccaaggtcgatcttgccgattggcagaacgtcaccgcacgtccggaagacgaaatcgtcatcgtgtccgtgggcgaacttggcccatggggctccggccgcacccgtttcgaagccgaactcggcatccattccgacggccaggtggatctgtctgccggcgcggtgctcgaactggcatggaatatgggtctgctgacgtggaacgacagccccaagccgggctggtacgacgttgatggcaacctcgtgcctgaggaggatatcgcggaacgttaccatgacgaggtcgtggctcgttccggcgtgcgtccgttcgacgaaggcatgggcaacgactacaaggacggcactgacgaggaagaggccgaggtattccttgaccacgatgtgaccttctcggttccgactcgtgagattgccgaagagtacgtcaagcttgatgaagcgcacaccagcttcgcggccgatgcggaatccggcgaatggaacgtgacccgccatgccggctccatgattcgcgtgcctcgtcgcgcggccatgacccgtacggtcggcggccagttcccgaagggcttcgatccggtcaagtggggtattccggcttccatggtcggcgacgtcgacaagatcgccttgtggaacatcgttactacggtcgacgcctacctgtccgcaggcttcacgccgaccgaaatcctcgaggcggtgcatccgtcgatggtggcctccacgcagggcaccggtttcggtggcatggcgtccatgcgcaagctgtacttggatcgcttcctcaaccatgagattccgaccgacattctgcaggaggctctgccgaatgttgtcgcagcccacgtgatgcagtcctacatcggcggctatggcaatatggtccagccggtttccgcctgcgccacggcagccgtctctcttgaagagggtgccgacaagatcgcgctcggcaaggccgacttcgtggtcaccggtgcgatcgacgacatcggcgtggaatccgtgatcggcttcggcaacatgaacgccaccgccaattcggaggaaatgtacgccaagggcatcgacgcgcgcttcttctcccgtgccaacgatcgtcgtcgtggcggatttgtggaatcccagggcggcggcaccatcctgctgacccgtggcgatatcgcgttgaagctcggcctgccggttgccggcgtaatcggattcgtgcactcctacgccgacggcgcgcacacttccattccggctccgggcttgggtgcgcttgcagcgggcatgggcggcaaggattccaagctggtacgcgatctggcccgtctcggcgtcaccccggacgacatcgccgtggtttccaagcacgatacgtccaccaacgccaacgatccgaacgaatccgaactgcacaacacgttggcccacgccattggccgcgccgacggcaatccgctgttcgtgatctcgcagaagacgcttaccggtcatgccaagggcggtgcctgcatcttccaggtcaacggtctgacccagctgttcaagtccggcgtgattccggccaatgccgcccttgactgtgttgatccgaagctcatgcgcgacgaccacatggtctggctgcgcgaaccgttgaaggtcggctccgtcaaggcgggcctggccacgtcgctcggtttcggccacgtgtccggctttgcggcgatcgtcaatccgggcgcgttcgaagcggcagtggccaacaccgcgggcgtcgaggcactgaatgcatggcgtgatcgcgccaacgagcgtttggctgccggccagcgtcgcctcgaggaaggcatgatgggccgcgccgcgctctacgagccgatcgacaaccgtcgtttccatgaggataaccgcggctacaacgcgcacgaggtggagaaggccatgctgctcgacccgaacgcgcgcctgggcgcctccggctacttcgaagcctgattcccgcgtctgagcgcctgaaatttctggcgctcagacgcgcgatcatcaaaatcccgtatctgtcgcaatctcagtatttcgcggcagatacgggattttcatattcttgaatcactctactttccgtctgcacgatttccgtttggtgtcgtattttcacttgtgcagacgcgaaacgaggggcgcgcaatgcgggtggcagaggatgaagcgcttaggtaggatggtgtccttgcatgaaagcgaagtgtcgcccgcctgtttcgcggaagtcgacatggttcgtttcttcctgaaaactttcgaaaggctggaaaatgctgggtttagggcatgacgtcgtggatgtgcctgcgttcgccgagcaactgggcgaaccggggtcgcgcatgcgaaacctgttctccatgcgcgagctatggcagaccgctcaacgtgtgcaggtcaaaagggacggtgaggcggtgcatcttgcggcccgatgggcgggcaaggaggcttttctcaaggcgtggtgcgaagcgatttcacgcagggcaaatgccgatggggacattgcctatccgtacacgctcgacgattttccttgggcgcgcatcgaaatacttgacgattcccacggcgtgccccgtgtcatgctctcgcccgaggtgcgacgcaagttgcggcaatcgttgggattgccggttgatggggatgatcaatcgtgcgcaatccatatttccatgagtcatgacggatccgtcgcatccgcggtggtgacgatagaagcgtgaccgcaagtgattgcgtcaatcgattgacgtcaatcgcgacaacacctcgaaccggtttgataaaaccgtaaaatcacgctacactggtgccaacgtcgtggcaacgaacgctgcggaatccaactcataacaacgaagttccctgggaagaggagtcaaggaatggcacggtccaaatccgacaaagcatttgacgagcgcgtcgcacaatatagtgaggaactgcgcgaactattgacggatctgtatggggagcaggccgacgaagccttccgcaacctcaccgagctgatggccaaagcccacgatgcgcgccccgccgatctgaagcgtctcgacaccaagcgtctcgccgatccggaatggtacaagcgcggcaacatgttcggtatgaccatgtacaccgatctgttcgccggggatctgaagaaactcgccgacaaagtgccgtacctgaaggaacagaaactcacctatctgcacctgatgccactgctgaaaatgccgcatccgcagaatgacggcggttacgcagtggaggatttcgacaccgtcgacccgtcgctcggcaccaacgaagacctcgccgcgctcaccaagaaactgcgtgcggcgggcatcagcctgtgcctcgacttcgtgatgaaccacaccgcatccagccatcgctgggccaaagccgctcaagcgggcgatccgaaatatcaggactactactactgccacgacgaccgcaccatccccgaccagtatgacgccgtggtgccggaagtctttccggccaccgcgcccggcaacttcacctggaacgagcagatgcacaagtgggtgctcacctcgttctatccgttccagtgggatctgaactaccgcaacccgagcgtgctcgtgtcggtgctctccagtgtgcttggcctcgccaatcttggcgtcgaagtgttccgcatcgacgcggtgccttacatctggaaggaactcggcaccaactgccgcaatctgccgcaagtgcacgccatcgtgcgtatgctgcgcatcgtgctcgaatgcgtctgcccggccgtagtgctgaagggcgaagtggtgatggcccccaaggagcttgccgcctacttcggcacgccggaaaagccggaatgccacatgctttacaacgtgtcgatcatggtgaatctgtggagtgcgcttgccagtggggacgtgcgcctgctcaaagaccagctcgacaagcttaacgcgctgccggagaactgctggttcgtcaactacctgcgctgccatgacgacatcggctggggcttggacgagccggtggaggagagcctcggcatcgacccgctcaagcataaggaattcctgtaccacttctacgagggatcggtgcctggcagctgggctatgggagagctgtacaactacgacgaggcatcgaaggacgcgcgcagctgcggcaccacggccagcctgtgcggtgtggaacgtgcgctgatcacgcatgacaagccgctgctcgacatttcgatgaaacgcgatctgatgatgcattccgccatgtcgttcctgcgtggcttccccatgctgagctgcggcgacgaaatcgtgcagctcaacggctgggaatacaaggaggatcccgatcgcgtcgaggattcgcgcaatctgcatcgcagccccttcaattgggagaatgcggccaagcgcaagcaggcgggcacgctgcagaagcagatgtgggacggtttgaagagcgttcgtgagatgcgcgacgatcccgcgttcgctccggaagcatgggtcactacttgggatgcgcataatgatgcggttcttgcggtggtgcgccacgttgaaggacgtacggtattgggattgttcaatttctcgtccgcacgtcagatcgcgcgtcttgattcggacggcgatatcgagcttcctgccgaagttgcgttggagccgtaccgggtttgcgtggtcgaaaaataattattacgatttcgacttgcgattgttgagggagtgtgtataatggctcgagtcgtttcgtgttggcttcggctggcatagacggtgcgcggatgtagctcaatggtagagcctcagtcttccaaactgattacgcgggttcgattcccgtcatccgctccacacaatcgttagagaagaagaaaggcgtgcttgacggcacgccttttgcatacctgccgtacgattgcttcgacgactgggtatgctggacgtgtcgtgacagcggtgcgacaatcgcaatacaacggagcgggtatggcacaaacgcaaggcaacaaggtgacggaagtcgtcgacggcgtggtcgaacaggtcgacgtttccaagcatccaacggcatccattgaggcgtccgatctttccttggccgatatcgaacggcgcaaatcgcatccggggcattgggcgctgttcatcgcgctggtgctggtggctttgatcgcgccttactggtggggacgtgtcatcgcagtcaaggatgcggcttggatggtggccaatctcagcttcctcgatcccaaaggcgtggcgctgatttcgtggacggtcaccattatggcgatggccggtttgggattgatggttgcggatgtgaagaaatggctgtggggcacggttttcgtggtgggactcgccgccgaacagttcgtcgccggcgtatgcctgctgagcttcaacttttggaacgccacctacgtgatgtacggcgattcctcagggctggccaacgcggcgaaccttggcattatcgcagccggatgcggtgtcgccgtctatgcggtgctctgggtcggattgctggtatgcatcaaaaaggaatcgaaattcaatgtgctgacgcgcagttgggcatcgttcctgctgttcttcgcgattgagatcatcgcgctcgccgtggtgttgttcggaggtctgctgaacgtggtctgatccgccatttgttgtggattcgatttggtctgcccttcgtgtatgatttccccttggcgtgtttcgcccgcggatagagagcgcgccggtattggaccggcagcaccgcgcagcaatataaggaggatgccgtggcacttacggctgaggaaaagcaggaaatcatcaagacttacgctacccacgagggtgacaccggctccccggaggtccaggttgctctgctgaccaagcgtatcgctgatctgaccgagcacctcaaggagcacaagcatgatcaccactcccgtcgtggtctgctgctgatggtcggcgatcgtcgtcgtatgcttgattacctcaagcgcgtcgacatcaaccgttaccgctccctgattgagcgtctgggtctgcgccgatagttacattcttccgcccgaatgccttccttggcgttcgggcgtttttgcatgacagccgcgttgaggaaaagacagtttgaaagcccaaggtttagggtgcatgaggtctagaatctaaagatgaggaagcgacgaaggtaacgtcgcgtcacgcatgcagaaatcggttggagtccgctgaagaggactgccgatagttggtaaaagaaaagaaaaaggaggaaccctatggagggtcccgaaatcaaggctgttgaagccgtaattgataatggttcatttggcaagcgcacgttgcgcttcgagaccggtcgtctcgcccagcaggcggatggtgccgtcgccgcctatcttgacgatgattcgatgattctgtcgaccaccaccgccggttccagcccgaaggagaactacgacttcttcccgctgaccgtggacgtggaagagaagatgtacgccgccggcaagattccgggctcgttcttccgccgtgaaggccgtccgagctccgaggcgattctggcttgccgtatcatcgaccgtccgctgcgcccgctgttcccgcacacgctgcgcaacgaagtgcaggttgtggaaaccgtgctcgccgtcaacccggacgatgcttacgatgttatcgctctgaacgctgcttccgcttccaccatgatttccggtctgccgttcgaaggcccggtttccggcgttcgcctggctctgatcgacggccagtgggtcgctttcccgcgttggagcgagcgtgagcgcgccgtgttcgaaatcgtggttgccggccgtgtcgtcgaaaacggcgacgtcgccatcgccatgatcgaagccggcgcaggcaagaacgcctggcacctcatctacgacgaaggccagaccaagccggacgaggaagtcgtcgccggtggtctcgaagccgccaagccgttcatcaaggtgatctgcgaggctcaggccgaactcaagaagatcgctgcgaaggaaaccaaggaattccagctcttcccggagtacgccgaagatctgtacaaccgtatcgatgagatcgcccacgccgatctcgacgaagccctctccattgccgagaagctgcctcgccaggatcgcatccatgagatcaaggagggcgtcaaggccacgctcgccggtgaattcaccgacatggacgatgccgagaaggaaaaggagatcggcaatgcgttcaaggagctgcagcgccagatcgtgcgtcgccgcatcctgacccaggattaccgcatcgatggccgtggcctgcgtgacatccgcaccctgtccgctgaagtggacatcgttccgcgcgtgcacggttccgcactgttccagcgtggcgaaacccagattctgggcgtcaccaccctgaacatgctcaagatggaacagcagatcgacgcactgtccggtccgcagtccaagcgttacatgcacaactatgagatgccgccgtactccaccggtgaaaccggccgcgtcggctccccgaagcgccgcgaaatcggccacggtgcgctggcggagaaggctctcgtgccggtgctgccgaaccgcgaagagttcccttacgccatccgtcaggtctccgaagccattggttccaacggttccacctccatgggttccgtgtgcgcgtccacactgtcgctgctcgccgcaggcgtgccgctgaaggccccggttgcgggcatcgccatgggcctcgtgtccggcgatgttgacggccagcacatcttcaagaccctgaccgatattctcggcgccgaagacgccttcggcgatatggacttcaaggttgccggtacttccgagttcatcaccgctctgcagctcgataccaagctcgacggcattccggctgacattctggcctctgctctgcagcaggccaaggaagcccgtaccaccattctcgaagtcatcaacgagtgcatcgatggtccggccgagatgagcccgtacgcaccgcgcatcatcaccaccaccgttccggtcgacaagatcggcgaagtcatcggtccgaagggcaagatgatcaaccagattcaggaagagaccggtgcggagatcgccatcgaagatgacggtaccgtgttcatctcctccgaaggtggcgacggcgctgaaaaggccaagcagatcatcgaccagatcgccaacccgcacgttcctgaagccggcgaaacctacaacggcaaggttgtgaagaccacctccttcggtgccttcgtgaacctgaccccgggcaccgacggcctgttgcacatctcccagatccgtaatctggccaacggcgagcgtatcgacgccgtcgaagacgtgctcaaggaaggcgacaccgttgaggtagtcgtgcagggcgttgacgatcgcggcaagatctccctggccattccaggcttcgaagatcaggaatcctccgctccgcgccgtgagcgttccgatcgcgatgaccgtcgcggcagccgtggccgtcgtgatgaccgtcgttccgatcgtgacgatcgtgattatgatgatcgtccgcgtcgtcgtcgttccgatcgtgacgatgaccgcgattacgatcgcgatgatcgtccgcgtcgtcgtcgttccgatcgcgatgaccgtgactacgatcgtgatgatcgtcgttccgatcgtgacgatcgtgattatgatgatcgtccgcgtcgtcgtcgttccgatcgcgatgaccgtgactacgatcgcgatgatcgtcgttccgaccgtcgtcgcagcagccgccgcgacgaccgcaatccgcgttacgcagccgacgagaactacgacgagtaccgtgccgatcgcgaagagcgttccgagcgtcctcgccgccgcgtccgccgcgactttgatccttttgaggactgacgcctcaaaaggatccctcgcagcatagctgactgactgaagtgccctgtaccggaaggtacggggcacttttgcgtttccatgcagattgcatgaaaatgagacacgggggcatgagttttgtcataacgtacctgggcgcatgcaagaatggtgtgaagagccattaacgaaggagtcgtcatggtcgttggcattatcattgccgtcatcgttgtacttattgtgctttgggccgtcagcgcctacaacgggctggttacgctacgtaatcgtgtgaagaacggttgggcgcagatcgacgtgcagctcaagcagcgtaccgatcttattccgaacctggtggaaacggtcaaaggttatgcggcccacgaatcccaagtgttcacgcaggtcacgcaggcccgtgccggcgtggtgcaggccgcgcaaagcggtgacgtggcgcagcgcatcgctgcggaaaaccagctgagccgcgcacttgtcaatctgcaggccgtatccgaaaactatccgcagctgcaggccaatacgaatttcatggatttgcagaatcagctgaaatcgttggaagagaagatcgcctacgcacgccagttctacaacgatgtcgtgcagaagtacaatacccagaccgaggttgtgccgaccaatattatcgccggcttgttccatttcgaacaggccccctacttccaggtggacgaagcggatcgtcaggttccgcaagttacgttctgacatgcatgtaaagccccgtccgatgacgatggggctttactgttcaattcggcttgtacggccatctgttgtacggccatctgagggaagaagaagcgagaaagagggattatgacggtcaaacagcatgcgtcgcgagcggtgcgcagcttcggtatcgcgatcgtcgtcaccgttggcgttgtagcggccatattgctggccatcgcattggatgacggtggggccgatctgagctacaaaacgctcgactacgatgtgcaggtgcaaagcaatggcgatttgaaaatcacccaacacatcgatatgaaactcgccgaccgcagcgatgacgacggcgaccatccgtggaagcagctgtaccagcagtacacgctgaaggaaagcaacctggccaatatcaccgatatcagcgtgcgcaacgcgacgacgggagagacctaccagcagggtgatatcgcaatcccaagcagctatagcaccgacgaatggaatcgagaacatgcggggcagtggtatatcgccgatgtttcgcaaggtgacagcaatccgcagccgttcgatcccgcaaaagacggtcttgttgccgacaataccgacgatcgttccaagaaaatcgaaatcggctggaatattcccgccaccacgtcggcgagcagcctgaaattcgatgtgaccatgaccatgcagggcgtgaccaccgcctatcaagacgtggccacgttccaatgggagccgctcggcgtgagcaatcagattcccatcggcaaggtcaccggaaccgtcacgttcccggatggcattacggcgaataattcatgggcctggctgcacaccgaacgtacgtcaaccaccgaacgtggtgataaggggtcgttgcagttcaccgtgcacgacgttcgtgccggcgactatgttgacgtggtcgccatgttcgacgtcggtgcgaccagcggtgcggcacgcactcgtgataccaccatcaaaaacggcattatggaaagcgaggcccaacaggagcagcagtggcgtgaccggcagcgcacaaaagcgcgtatccgcctgatcacgtggatcgccattgccgtggccgggctgatcttgtgtgtgatcgccgttgtgctcgcattgcatagtttcgatcgttcgcaataccacggtgacatcgagtattggcgtgacgagccggaaatgagccccgccagcgctgcggaactgctgtatatcgttgacaacaagcattcgaaaacactgtcgagccgaaaaatgtcggcttccgtgctctcgctcgcttcgcgtggagcaatcgccatttacccggggccggccgccatgtatcggggcattgatatgagtcggtctcgcaatgccgatatcgcgcagctgatttccaatgatccagctcgtgcgcgtgatgcaggcaaaaccagcaccatcgtgatactgccggtggtgttcgataacccgcagtcattggcgctgagccagagcgaacgtaccgcgctcgacctgctggtgaaggcgtccgaacgcattggttctccggtgttcgatctgaaacagatggacaagaatttctccgattggtcgaagggctacaagtatcaggaaaagtttacgaatgcgtgcagtagcgaattctccatgttgggtgccacttcgtcatgcggcgggggagcgttcgccgcaggcatctgcgccgcgatcctggcgttcctttccatagtgtattttggcgtgatcggcaatcttgcgttggtcgtgctgatttccgcgccgatgatgttcgcgtccgtgtttgcgctgagctacctcaaattgaaggggcttaacgacaatggtcagcgtcttgccggtcaggtggtcggtttgaaacggtatatggaggatttcagcgacttccgtgatcgtggtgtggctgatctgacgttgtggggtcgctacatggtgtacgccaccgcgttcggcatttccgaaaaggcgatgaagcagctgctcaaggcgtacccgcagcttgccgacccgagttggcttgatgccaacgcttccgattcgctgctctactggagttaccgttcatggtatttcaatcatcattacgccggtcctgcttcgtgtgatacgaattcgatggatttctcgccgagcgccaattttggtgatattggcgcgcagttggaatcaggttttgctgatattcaatcgacgattgccgcggcatctccgtccagcagttacggtggttccggtggtagcttctccggcggtggtttcggcggttcctccggtggttccggcggcggcagcttcggtggtcgctgatctgcggcattacgcgcatgtttggtgggtttgttgtctgctgaggcgggtcggctggtaaggttgcattcggaaagacactctgtacgttgttgaaggagatcgggatggctttgttccgtaatcttggaccgttccgcaccacggccatcggccatggtgaaatgccgttgaccattgaaaacaatcgtggtcacgatgtcggtatcgaaacattgcacgcctcgttggatgccggatgccgtcacatcgacaccgcttgggcgtactacacgccgggcgaagaggaacagaccggcgaaaagctggtgcgtgaggcgcttgactcgtggaagggcccgcgtgaggaagtcaccgtggccaccaaggtgggcttgcgccgcgcttgggagggtgacaagccggtttggccgcgtgacggcaagccggagcatctgatcgaatacggcaagcagtccgcgatggcgcttggcgttgacagcatcgatctgctgtacctgcaccgtcatgatccggaagtgccgtacaacgagtcctgcgaaggcatcaaggcgctgctcgatcagggcgtggcccagtgggcgggtgtttccaacgtgagcatcgaacagttgaagatcgcgcaggagatcctcggcgacaagcttgtggccgtgcagaaccagtattctccgattcatctggacacccaagatacgcttgactattgcgccgagcagggtctggcgttcgtgtgctggagtccgttgggcggctaccgtcacccgtacgacgagcacctgttcgatccgttccgcgaggtggccgaagcccgtggcgtgagctaccagcgtgtggtgctcgcatgggagctggccaagggcgaccacatgttcgtgattcccggcgcccatcgaccggaaaccattctcgattccctcaaggccgacgagctcgaactcaccgaagaggaactcgccaaactcggctgagtgtcagattcgcaacgttttgcgtcaaggcgtccgtctccacgatggacgcctttgtttttccgcatgtgtttttcctcgtatgtatttcccggatgcggcagaagtgtcccgtgaatagtcgagaatatagagcggaaaaatcgagtaagaggaacaagcgtgcaaagaagaaacaagcctgaagtattggctcccgcgggcaatctgcgaggactgaaaaccgccgtcgattacggtgcggacgccgtctactgcggaggtaaggcgttcggcatgcgttcggcgccgaaaaacctgagtttggaggatttcgaagaaggctcccgttacgcgcatgagcgtggcgctcgcgtgtatgtgacctgcaatgtgttgccgcgcaacaatgaagtcgaagcgatgcgcgaatacatcggccagctcaaagacaccggcgtggacgcactgatcgtttccgacattggcgtgatgctcatggctcgcgaagtggcgccgaacctggaactgcatgtgagcacgcaggcgggagtcaccaactatcaggcagcgaacgccttctaccagttgggtgcacgtcgtgtggtgcttgcccgtgaaatggatctgcaggccgtgcgagacattcgcgcacgcattcccgacgatcttgacatcgaatgcttcgtgcatggcgcgatgtgcatggcgttctccggtcgttgtctgttctccaattatctgaccggacgtgacggcaatcatggcgaatgcgctcaactgtgccgctggaagtattccatcgtcgaagaaaagcgtcccggccagtattttccgatagaacagactaaggaaggcgcgtatctgttcaattcgcaggatatgaacatgcttgcgcatatcgacgatctgcttgattcgggtgcgaccagtctgaaaatcgaaggacgttccaagagcgcctactatattgcggcgatgacgaacgcttacaagaccgccgttgacgcatacatggtgcaacgcggttttgaagacgaggatggcactgtgctgaagccattccatgaccgtgtgattcgcccgtctgatccggattacggcaagccggaaaccaccgatttgattatggaacatgcggatggcgcgttcgcggggaagccggatattgcaactgttccagtcgcttccgccggcgaaccggatgatctgagctaccatgcgcgtagtacgaggcgtaagtcgaacacggctgcggaaatcctgccggaaggctggtatcacgccggagtgcgcccggcggaacacgtgtccctgcctgactggttgctggacgagccagacaaggtggcgcaccgcgactattccaccggcttctactatccggaacacaaagtgcagcaaagcaccgaccgttccgcgtatttccgcgcttggctggtggttggcgaagtgctctcgtggagtgaagaagacggcggccgtgtgaccattatgagccgcaacaaaatcgaagccggtcaggaagtcgaattcgtgctaccgggcgcggcgccgctcgcctacaccgttcccgcaggcggattccgtgacgccgacggacattgggtcgaatccatcaacaatccggcgcatgtcttctccatgccatgcccgcaggaagtgcccgtgaacgcagccatccgatctcgtaccaaaaagccgacgctcaaagcggaataattgcgaaaaacatcgtgtagacgcagaaaatcagcagaaataagttgaaataatcgtagaacaatcaaggaaaacaaaaaaatgactgacaagcagtatgacgacgcgattcttgacagcaatgcgatcgacccgaccgacgtggacggcaatccaatcccggtgaccattccgatcatgcttgcgccgggcgtcaaagtcgtgtacaccacgcgacttggtggcaccagcgaaggcgattatgcgcactgcaatctcggaggcaagtccggcgatgatccgaaccatgtgctcgccaatcgtgtggcgctctccaatgccatcgacgcgaagctgagcttggtcagccaggtgcattccggcgttgccgtcgatgtggacgaattgttcgtcatgaaccgtccgttcggtttcgacgtgtctggcggcaagggcgaaaccgctcagcaggtgggcgaaaccgcggatgagccggcagtggttgaagcggacggccaggtgaccgctcagaagaacgtggcgctcggcatgttcgcggccgactgcctgccggtgctcatggccgatccggaagctggcgtgatcggcgccgcgcattgcggccgtcgtggcctgcagaacggtgtgatcggcgccaccatcgaaaagatggtgtccaagggagccaggccggagcgtattgtcgccacgctgggcccgtgcatctgcggcgactgctacgaggtgggcggagacattgccgacgaattcgacgcgcagttccctggaaccttcacgctgagccgtttcggccagccgggcatcgatattgcggccgccgcgctgcaggagcttgccaaagccggtgttccggctgataacgtcgtttcctcccgcgcccgcgtcaacgcagccacccagtatctttccgaagacgaggaattggcggaaatctgccaggccgatggcgaaggcgaaccgcagctcgcggaacgtttcaagaaaatccgccgtagcctgtgcacgctggaaaatccgctctggttctcgcatcgccgtgccaccatcgcaggcaaagcgcacgaaggtcgtatgcttgcgctgatcgtgcgcgaatagtgggagagcggcgcgctattgcggattgcgtgcagaacgtaaggcaaaacgcgctgcaaaccgattcgggggtttacggtgggacgtatgagtgagagagagcagatgcaggaacagaagatgccggttgtggccgtggtgttggcggccggtttcggcacgcgattcgatgagaccaatcccaagcagttggtttcggtgggggataagccaatcgtctgctggagcatcgaggcgttcgaacgcaacgatcgcgtgagcgacatcatcgtcgtggtcaacgagcgtgtcagcaatatggtgaacatgctcatcgacgaagccggttataccaaggtgcgtgccgtgattccgggtggctccgagcgtgtggacagcacccgctccgcgcttgatctgctcaagcaggcaggcattcccgatggcgcgaaaatcctcatccacgattccgtgcgaccgttcgtcgaacagcaatccatcgacggctgcatcgacagcctcgaccagttcaacgcggcgaccgtggcatacgcgtccactgacacgattctactgaccgaagatcttggagagcgcaaggtggtgcgctccgtgcctgatcgtacgaacgcattccgcgcgcaaaccccgcaggccttccgtttcggtaccatcaccaaagcctacgagctcgccaccgccgatcccgacttccacccaaccgacgacacccgcgtggtggtggactatctgccgaacgagccggtcgccatcgtcgccggatccgaaacgaatctcaaaatcaccacacaggccgacatgccgatcgccgagaacatcgcgcgcagcctcgacccggaacatgccaaacaagaagcgaaagcgcgcatgcacgcggtgttcgccgaagcattctcgcaaatgcataagcactgatcgtaaacgaacccacctttcaaccacgtacactggaacacatgcagcagatcaacatcgtcatctcaggtttcaccccgtacgacggcatcgacgtgaatccggccgtacttgttcccgtggcgctcgccgaatattggaatgatccatctcaatccgtggcgctgtccgacgatcttctgcaggatgtttccatgagcgtgacgacggtgacgcttccggtcagtttcgccaatgcctggcccatgttgctgaacgccatcgaacaggcgaatcccgatattgtcatcgccaccggtttgaagcgttcggcccgcggcgtgctgttggagcgatgcgccacgaatctgatggacgcggccaagcctgacgccgacaatgtgattccgcctcgccgtccgatcaatccggaagggcctgcggcatattggacgcgcctgccgttgcgttcgattctgcgcgatttcgccaaacatgagattcccgccgcgttgagttcggatgcgggcacgttcgtctgcaattcgctgttctaccatttgctcgactggtctgcagcgcaggaaaagcgcattctgtcgggtttcgtaagcctgccgatcgtcaacgagcagccacatccgcaacatggactgtcaatcgcgcagcaaatcgccgcaggtaacgatgtgatccgcgaatcggtgcgttattatctgcagccatcctcaagtgagattctgctcggctgaacggcgtcggcgtttcctcgaacgatttctgtgctctctgtgagaattatgcgactgccgtgtgccgaacgtttgttctgcgctaaagttcaaaacggataggcgcgggcaagatgcgcgatggaagggaattcgtgaaaggaataccatggttgagcagttcccaatcgtgttgagggggtacgacaaggaaagggtcgatgaggcgttcgctttggctcaggagacggtggaccgtctgcgtgatcaggtcaaggccgacgatcagaccatccttgaactgcaggcacagctgcaggaagagaaaaacaagaaggccaacccgaattcgttcgcatctctgggcgccaacgcgcagcagatgctcgccagcgcggaacaaaccagcgccgagctgctcgaccgtgccaagaaagacgcttccgcggcacgcgccacggtgcagcttcaggccgaaaccctgctgaacaacgccaagctcgacgccaagcgtattctcgacgaggccaacgccaaggccgaagcggtgctgtcgaaggccaataatgatgccgacacgttgaagtccaacgcccagcgcgaagcggaccagctgcgtggcgaagcgcagaaggccgtggtggcgcagcgccagaccgtcgatctggaattgacgaactcccgtgaggagcacgacaagcgtctcgcatcggagcgcgccacgcaggagcgcgagctctccgatctgcgcgccgaagccaccgagcagatcgcggcgcagcgcaagaacgccaatgacgagatcaaccgcatgaaaagcgagaccaacgaccagatcgaatccgcgttggccgaagccaacaagaagctggccgacgtgcgtgagcaggtgtccaagatgatgacggacgcgcagcgccgtgcctcggaaatcacggataccgccaaagccaaggcacaggagatcaccgacgaggccgaagtgcatcgcaccaagaccatcagccaggtcaatgccgaggtggagcagattcgcgccgacatttccgcccagcaggatgaggctacgaagaaggtcaacgagctgcttgccgacctgaacgaacgccgtgaaatcgccaagaagcagtccgacgagctgatttcagaagcgcagcatacgcgcgatgaggccgaggcatacgcttccgacaagcgtgaggcagccgacaagcaggctgccagcattctcaagcaggccaccgaagaggccgacgagcagatcaacgagcgtcgtgaggcagccaagagcgagcttgaaggtgtgcagcagcgcatcgccgacctgcagacccgtgaggcgcagatcacgcagcgtgtcagtgaactgcgtgccatgtttgccaacgcgttctccggtttcggcgcgaacggcctgtccgtggtcaattccatcgacggcgaacagcatgattccgcagctgaagctgaaactccggcggaatcgcacgacgagagtggcgaaactgttgcgggcgaaccggaagtgaccttcgacgaggatgttgtctccgacgaacagcagaataatgacgattttgaagaaccgtccgaagacgagcagtctgaccagggcgaagaagcacaggaggaacagaacaatgactgacatcacgccgttgagcgctgatgcattggcaacgctggttgaggatttcgaagccagcgaccacaaccgtatggccatgaacgcggtcaccgcggctggcatcaacaaggtggcacgcaactatgaccgcgcccgcctgatgcagcgccgattctccaccattgtcgacaatggcaccgccacccatcaggatcgttccggccgttgctggctgttcagctcgctgaacgtggctcgtttcgtggccaagaagaacatggggctgaaggaattcgagttctcccagaactatgccatgtactacgacaagctcgagcgcgtcaactacttcctgcaggacgtggccgaactggtgaaggccggcgagccgtccgactcccgcctgatccagcatctgctcgccgacgcgatgggcgacggcggccagtggaccatggccatgaacgtgtacaagaagtacggtgccgttccgaaggatctgttcccggaaaccgaatcctccaagaacaccggcgaaatgaacgtgcaattgcgtcgcctgctgcatacggccgtcgcgcacatgtatgctgatccggcttcgatcgaatcggtaatcgccgaagcgaccgccgccggacaccgcattctgacgattcacttgggcgagccgccgaagagcttcgactgggagtggaccgacaaggacggcgagttccaccgcgatggtgaggtcacgcctgtggaattctggcagaagtacgtcggttccgctgatttggaaagctacgtgtgcctggtcgacgatcctcgtcaggagcatgcgaagggcaagaagatcggtatcgagcacttgggtaatgtggccgggggagacccgaccgaatacctgaacgtgccgaaccagttcatgaaggattgcgtgcgtcagattctcgaagagcagggcattccagtatggttcggtgctgactgccacccgatgatggatcgtgaaaacggcgcttgggctactgatctgtttgaatacggcaaggtgtatggcgtcgacttcgatctgaacaaggaagatcgcgtgcgtttcgccgattccgcgatgaaccacgctatggcgttcgtcggcgtggacgtggccgaagacggcacgaccacccgtcgttggcgtgtggagaactcttggggcgacaagatcgcagacaagggctacttcactatgagcgacgactggttcaccgaatacgtgtacgaggtcgccgtgccgaaggcgctgctccctgccgaatatcaggccgctcttgacgagccagccaccatgctccccgcatgggatccgatgggcgctctggctgactgatacgtaaaccgacaaaccgattgacgaatgccgactgcatgggacttcgcaaaaagtccagcatgcagtcggcattcgtgttattccacttttatccgttaaggtaacttcggtgattatcatccatgcacagtatgcatgaagcaggtatgcaggtataaggaggagcagaagagatgtcaggtcttcgcggtccagatagttcgaaggatgcgcagttgttggataacgccgtgtttccggagaccgtggatgtcaatattcgacagttggacccgattccggctccccgatattttctgaaggaaattccactcaccgatgagatgagcgatctggtgttgaagtcccgtcaggaaatccgcgatgtgctcaacggcaaagacgatcgtctgcttgccatcgtcggcccatgctcgattcatgatccgaaagcggcgcacgaatacgcggcaaaactcgccgcggtcaaaaaagaactggaagaccaactggtcattgtgatgcgcgtgtatttcgaaaagccacgcaccaccatcggttggaagggtctgatcaacgatcccgatctcgacggccagttcaatattcgcaagggcatgtggctcgcacgcaaggtgctgaccgacgtgctgagcgttggactcccggcagccacggaatggctggatccgatcaccccgcagtacatctgcgacctgattagctggggtgcgatcggcgctcgcaacaccgaaagccaggtgcatcgcgagctcgcgtcgggcatgtcgatgccaatcggcttcaagaacgccaccgacggttcgatcaagccggcagcggattcctgcttcgcggccgccttcgagcatcatttcctgtccatcaatcttgacggtcgtgtgatttccgccgaaaccaagggcaatcccgattgccatctggtgttgcgcggctcctcgcacggcccgaactacgataccgattccgtggcgaaggcgttggccgatctgaaggtttccaaggcgtccggcccgagcgagcacggtcttgtcatcgacgcggcgcacggcaactgcggcaaggacgaagtgcgcgaagccgaagtgatcgaaaacatcgcctcccgcatcgcaacgggagagtcgggcatcagcggcatcatgatggaaagcttcctgaaagccggcaatcagaagcccgctccgctcgaccagctcgagtacggcaaatccatcaccgacgcctgcgtgccgtgggaacgtaccgaacagttgctgcacacgcttgccgatgcggtcgaaagccgtcgcgcactcgccaaataagcgcaaataatcgcaaataactaaccgtgcggaatacgtgtaactgcgtaatcgcacggtttttgcatagcgactgccatttgattgatattcttggggagataggtgattgtcaaggagagcagtgaaatgcagcagcagctgaacacgcctgaagagcttcgcgccatccgcgaggccatggatgagggaaagaatccgctggtggctacggatgtgccacgctgggaagatcaggtcggcatcagccgcatcgtgaaccgcagggtgcttgaattcgaggtgcttcccacgccggcgcaggtgttgggggacctgccgctcagcgatcaggcgcaagagatcgtcgcctattcacgcgatgagattcgtgcctgcctgtacggccaggacgatcgattgctggtgatcgtcggtccgtgttccgtgcatgatccggctgccgcactcgattacgcccgtcgcttggccgcgttgaaagacgagctgggcggagaattgctgattgtgatgcgcgtgtatttcgaaaaaccgcgtacgacggtcggttggaaaggcttgatcaacgatcccgacatcgacggcagctgcaatatcaaaaaaggcctgcttttggcccgtcgtacgctgcttggcgtattggacgcaggtttggccaccgccacggaattcctggaaccaaccagcccgcaatacatttccgacgcggtcagctggggtgcgatcggcgctcgcaatacggaaagccaggtgcaccgccagctcgcttcgggcatgtcgatgccgatcggcttcaaaaacgctaccgacggttccatcaaagcgccgaccgactcgtgttttgcgtcggcacagcagcatacgttcttcggcatcgatcatatgggtcgtgcggccgtagtcaaaacgcttggcaatcccgactgccatgtggtattgcgtggttcgagcagcggcccgaactatgacgccgaatccgtggcgaatgccatgaagctcatccgtgaggaaatgccggtcgaatccgcggcggcacacggtctgatcgtggactgctcgcacggcaattccggcaaagacgaacatcgccaagtcgaagtggtacgtaatatcgcaagccgtatcgccgaaggtgaggaaggcatcaccggcatcatgatggaaagcttcatcgaaggtggcagtcaaaaaccggcaccgctcgccgaactcacgtacggtcaatccatcaccgacaaatgcttgagctggcagattacggaagcgttgctgcgcgaacttgcgcaagctgtggacaagcgccgctggaagtgagcgaagcgaaaataagcgaaaccgagcgaaaagcgtgaagcaatcgaaaggaacgaacgcatgagcacaatcgccatcatcggcgccatggacgaggaagtcgccaatatcgcatccgcattgagcgacatcaccgtaacggaggaagccggcgtcagcgtgacacgcggcaccatcgaaaccaacaagggcactcgcgtcaacgttgcggcaacggtcggcggcatgggcaccgtcaatatcgccgccaccacgcagcatctcatcgacgcggaccagcctgacgccgtgatcttctccggcatcgcaggcaatctcaacacgcatctgcacatcaacgacgtggtgcttggcggcacgttgcgctacctcgacaccgacatgcgtctcgtcggccagtggaagccaggcactgcggaccagccggtggaggaattccactccgacgaccgtctgatcgaagtcgccgataaggtgctgaccgatctgagcgtgcatcacatcaccggcatcatcgccacgggcaactatttcgtggacgatccgaagaaagtggagcaggtgattcgcgaaaccggcgcggacgcggtcgaaatggaaggcgccgcggtggcgcatgtcgcggcgcgcaacggcctgcccgtgctggtcatccgcgcgttgagcgacaatgccgacacggattacgtggaattcaaggaattcgacatttccgaatatgccgacaccgcggcgaaaatcgcggtgaacatcgtcaagcgcatgtaagcgcatgaaagacggcccgtccaacgcatcggttgctggacgggccgtctcatatttcggtatggcgaatctcacgaaagtgaactgcggggaaacttccgatggcgtgagggaatcgcgcacggaaatcgctttccggaaccgctactgttgaagaagaatgacggattatcggaaggttaacgtatgacgctggagcacgtggtgatggcgattgtggttgttgccgtcgctgtggtcgcctttttgctggggcgtgcccgtggcgtgcaattgggggaggatgagatcgacccgaacgatccaagcctgttcggcgtgcagaagaacatgtcgctgttcgggccgcgcgtgcccgtgcagtccacggaacgccagctgatcgccgtcatgccggaggcgttgatcgtcgtcgattcactggcgtcggtcacatacgtttccccgggcgcgcaacgtttcggcattgttgaggacagtgcgatgacgcttgccgaaatccgcgatattctgcgattggtgtcgaccgacagcgtggtgcgcgaacgcgaattgtcgattccgctggatcgagccgcccgtgcggccgcgaaaaacaccgacggcaaaggcattgaggcaggtaagttccgtccttccgatacgctgtatctgcatgtgcgggtcggtcagatctccgatgatctttttgcgattttcatttcggatatgagcgagcagcgtcgttttgagattatgcgacgcgattttgtgacgaacgtttcgcacgaattgaagactcctgccggtgcgatttccctgcttgccgaaacgatcggcgacgctgcggacgatcccggcatggtgaagtattttgcgggccgcatttccaaggaatccgaacgattgacggaattggtgcatcgcttgatcgacttgcagaaggcgcaaagcgcggctgcggtgctgaacgcggaacggctttccgtgcttgcgttggtacgcgaggcgatcgtcgaaaaccaggtgaaggccgaatcgaagcatatcaatctggtgctttcgctgaatggcaagcagaagctggtgcacgtcgagggtgccgtaaacgctgtcgatgaggatgatctgttcatcaacgccgatcatgaaaccatcaaaacggcggtgaagaatctggtggaaaacgccgtcaactattctccggaacacaccaccgtcgcagtcggcatcggcagtggcgatgacgaggttgcgattcgtgtcgtcgatcagggcattggcattccggaatcctcgctggatcgtattttcgagcgattctaccgtgtcgatcccgcacgttcccgcgaaacagggggtacaggattgggtttggccatcaccaaacattgcgtgcaggattgcggaggcactatcgccgtgtggtcgcgtgagggggagggatcgaccttcaccatcaccctgcctcaggcacaggcggtggaaacagcggaaactgcagagactgcgggaaacgtacaaactgcggaagcggatcgcatggaagtgacgggcgaaaccgaacgcatcgaaactacgcaatccgagtaatccgaataatctgagctaaaccgaatacagcaaataacaagcaacgttcccatcaacagagcaatggaggagaagcactgatgacacgtattctgatcgtcgaggacgaggaatcgtatcgagagccgctggtctaccagctcacccgcgaaggctacgacgtgtccgccgcggccaccggcgaggaagggctggaactattcactaaaggcggcatcgatttggtgttgctcgatctgatgctgccagggcttgacggcaccgcgctatgtcgcagaattcgtgagcaaagccgcgtaccgatcatcatgctcaccgcgaaaagcgcggaaatcgacaaggtggtcggtttggaaatcggcgcggacgactacatcaccaagccgtactcgttccgcgagctgctggcgcgggtgcgtgcggtgctgcgacgcaaccagatggtggccgacgcgacggaatcctccgatgacgatattccgctgatctgcggcgacatttccatgaagatcggccagcatgaggtgatggtgcgcggagagaacgtgttcttcccgctgaaggaattcgagcttctcgaatatctcatgcagaacaagggccgtgtgatgacccgccaccagctgatcgaccgcatttgggggtccgattacgttggcgacaccaaaacgttggatgtacacgtcaagcgtgtccgctccaaaatcgaggaggatccggcgcatccgaaatatctgaccacggtgcgcggtttgggctacaaaattgacgttcctgcggaataaagcggaaatatcgcgatagctggaaatatataagataaaacactgcgattccagtaatcatcgtaagttgccgaataattgattattgattgataactgaatgtaagaccgtggtatcacggtagtcgccgaagatcggtgaatggaaatgacgaaaacgtccgaagtgtcgtagagcgttcatcttccgttcaccgattttggttttgcgggacccaaaccaccaataggcttgacagtgtcatgaagaacgatggcgacaacagcatatgaaatgtcagaaacatacgccatcagaatgttgacagagggaaaagaataatgcgtaattccattctcgtacgctccattgcagctgtgtccggcattgtgatgctggcttctgtcgcggcttgcggcgacaacactgcctccaacactgattcttcggctagcaccgacaccaagaccaccgaagccgtgtccggcaacttctccggcgctggcgcttcctcccagcagactgctgtggaagcctggatcgccggcttccagggcaccaacccggatgccaaggtcgcctacaacccgtctggttccggcgctggcgtttccacctttctgaccggcgccaccgcatgggccggctccgatgccgccctgtccaatgacgaggtcgagcagtccaagagtgtgtgcgcttccggcaacgccttcgacatcccggtctacgtctccccgatcgccgtggtcttcaacctcaacggcatttccggcaagggcaagaccctgaacatggacgccgacaccatcgccaagatcttcgacggcaagatcaccaagtggaacgatgacgccatcaagcagcagaacccgaaggtcgacctgcctgatctcgacatcaccgtggtgcaccgctccgacaagtccggtaccaccaagaacttcctgagctacgtcaaggatgctgctggcgacgcttggagctacgagctcggcgagaactggccgaacgaggttggtcagggcgctaagggtacttccggcgtgatctccaccgtgcagcaggctgacggcaccatcggctacgccgatgcttcccaggctggcgagctcggcaccgttgcagtgaaggtcggcgacgattacgtgccgttctccgctgaagccgctgccaaggttgtggacgcttccccgctcgacgaatccgccactggcgacaaccgtgtggtcgtcaagctcgaccacaacaccaccgaggctggcgcctacccgatcgtgcttgtctcctacgacatcgcttgcccggcatacaaggatgccgacaccgccaagttcgtcaagtcctggctcacctacgtggtcagcgacgaaggtcagcagaccgctgcctccgcagcaggctccgctccgctgtccgacaccatgcgccagaaggtcctcaagtccatcgacgccatcgaaaccaagtgagctttgatacagtaagcgataggctctcggtgaacggcaactgaccgtctgtttcaggccgcagccgcaacatgaaagcgggtgcggcctgaaacggtacctgcaggtaaaacaaaaaacgcagtcatcgcaagtaatcgcagatctgtttcaaacaatcgcaagttaaggagaacccgtgagttcgcaaagcaaaacggcacagcagccggtgagcggcaaaaacgcggataaggtgttcaagggcgtggcctacgcctgcggcatcctgatcctcgtagtgctcgccgccgtcgcgctgttcctgctgttccgcgcatggccgttgatcggcggcgatcagcaggccaacagcgacaccatcagcaacttcaccggcggcaaggcctccagcttctggggctacgtcggaccgctgctgttcggcaccgtgctgatctccgcgctggcactgctgatttccttcttcgtgtcggtcggcatcgcactgttcatctcgcactacgcgccgaagaagctcgccaccgccttgagctatgtggtcgatctgctcgccgcaatcccgtccgttatctacggtctgtggggtggcctggtgctggtgcccgccatctacccgttctggaattgggtggccaagtatcttggctggattccgctgttcgcaggtcctgccgccaatccttcccgtaccgtcgccaccgtggccgtggtgctcgcagtcatgatcctgccgatcatcacctccatgtcccgcgatatcttcctgcagactccgcgccttcaggaagaggccgcgcttgctcttggcgccaccaagtgggaaatggtcaagcttgcggtgctgccgttcggcaagtccggtgtggtgtccgcttccatgcttggcttgggtcgtgcgcttggcgaaaccatggccgtgctcatgatcctgtctccaggtctcaactactccatcaagctgctgcaggcttcgcagaaccagacgatcgcagccaacatcgccgcgcagtatcctgaagccaacgatctcggcgtgtccgtgctgatcggcaccggcctggtgctgttcctcattacgttcgtggtgaatttcatcgcccgtaagcttaccgagaaagcgagtgcgtgatgaccgcagtgaataacaacgcttctccgatggacggtgcccccgtcatcgatttcgacaagttcaagccgacgcgttcctttaccgctgcacgtaagcgcaaggatcttgcgatgcgcgtactgatcgctcttgcgttcattgtggcgctgattccgctgttctcggtgctgctcaccaccatcgtcaacggtgtcaagaggctgaacctcaacttcctgagctataacatgaccggtgtggtcggcggcaatccgacgccgtccggtggctacggcggtattcagcacgccatcatcggtacgctggaaatcacgttcggcgccatgatcatctccattccgatcggtctgatgtgcgccgtgtacttggtggaatattccaaccgtggcaagctggctcgcgtcatcaccctgctggtcgacgtgatgagcggtattccgtccatcgtcgcaggtttgttcgcattctcgatgttcacgattctgattggacctggcaccatcaacggtttcgaaggttccgtggcactgtcgctgctgatgctgccgaccgtggtcaagtcctctgaagaaatgttgaagatcgtgcctcacgacttgcgtgaagcgtcgtatgctttgggtgttaccaagcagcgcacgattacgaagattgtgttgcgtaccgctttgccgggcattgtttcgggtgcgattctcgccgtcgcccgtgtgattggtgagaccgctccgttgctgatgaccgcaggctacatcgcctccacgaacgtcaacctcttctccggccagatgaccacccttccggtgtacgtctaccaggagtactccaagctcaacgcgaattgcccggcttccgccgacgcttcctgcgtgaccaccatcccgatggaacgcgcatgggccgcggctctcgtgctgatcctcatcgtgcttatcctcaaccttatcggtcgactcgtggcgaaggtcttcgccgtcaagtcggaacgatgagcggtagtcttacatacagaaacaacatataaggaaccaaaatgggacaacgtattgatgtcaatcatctgaacatctactacggcgacttcctggccgttgaagatgtgaacatcaacatcgaagccaacaaggtcaccgctttcatcggaccttccggctgtggcaagtccacggtgctgcgcacgctcgaccgcatgcacgagatcattccgggcgctcactgcgaaggcgaggtgttgctggaaggcaagaacctgtacgacaaggacatcgacccggttgccgtgcgtcgcgatgtcggcatggtgttccagcgtgcgaacccgttcccgaccatgtccatccgcgagaatgtgctcgctggcgtgaggctcaacaaccgcaagatctcgaagtccgatgcggacgatctggtcgaatgggctctgcgtggcgccaacctgtggaacgaagtcaaggatcgtcttgacaatcctggcattggtctttccggtggtcagcagcagcgtctgtgcatcgcccgcgctgtggccgtgcacccgcaggtgctgctgatggacgagccgtgctccgctcttgacccgatttcgacgttggctgtcgaggatctgatcaacgagctcaagaacgactacaccatcgtgatcgtgacgcacaacatgcagcaggccgcccgtatcgccgactacaccgcgttcttcaacctgaaggcagtcggtcagccgggtcacctcgagtacttcaccgacacgaccaccatgttcaacaacccccagaacgaagaagccgagcgctacgtatcgggacgctttggctgatcggcaaagccgatcagccaaagcgtagcgttgacccagtgggtcaacgcaagcgagctttagcgagccagcaaattgtgcttcgctttgcgaagctccttaattgcacgcggctgatcggcaaagccgatcagccaaagcgtagcgtcggcccagggtgacgccgttaagcaaacagtccagtggactgtttgtaggcggcgccgagatgcgacagtatcgaggcaggaaatagtgccttgccttggcaaggctccttttcctgcgagcttgcacgcggctgatcggcaaatcatctcttactcccgcttgcgggggattgtcgcacggatgtgcggtcgaaagtggttgcttcgctaaccattttgatcccattcgtggcggccgttcccctgagcgggagttttttgtatgtgatacctgatcgcgacacgctctattgataatgattctcaattaagttatgatggtgttatatcacgttagggaggatctatcatgtaccgtattgtgagaattgcgattgccgcacttgcttctgtaggaatgcttgcgtcggttgctgcgtgtggaagcggccgatcgtcgtccgaaaaaaacggaaccatcgaagtggtcgcttccgtgaatcagtggggtaccgtggcgaaaaccttgggcggtggcaacgtcaacgtaaccagcatcatcaattccaccaatgtggatgcgcatgattacgagccaacgacgtcggatatcgccaaactgcagaaagcgcaagtcatcatcgtcaatggagccggctacgacgcatgggcggtcaaagcggcgcaatccgccaacgcaaccatcgtcaatgccgctgcagtcggcggggtgaatgacggcgaaaatccgcatgtttggttctccgccgatgtgcgcaaggcggtggcacaggcgatcaccgaagcgtacgaacaggccgacgccgcgaaaaagagtgatttcgacaagctgcacgatcagtggaaatctgaagaaaacaacgtcgatagcaaaatcgccgaagtgaaacagaaatcggatggattggcgtacgcggcaacggaatccgtggcaagctatctggcggaagacatgggtttgaccgacgcaacgccaagcgggtacgcgcgagccacagcgaacgaaagcgagccgacgccaacggatatcaggcagttcgccgacgcattgaaatcaggtgaaatcaaactgttgatcgtcaatacgcaggaggaaagcgagctgacgggcaaaatcacgaatgccgcgaaatccgcaaacgtgcccatggttgaactgaccgaacagatgccggaacaatacgattccttgacggcctggatggaaagtctggttgacgccttctcgaaagccatcgcataagacggttcactaaaaagcagtacgaaaacaagcgatacaacaataggggcgactccgcagtgagagcggaatcgcccctattccatttgccgaatttaaatttatttactgaaccagtaatttcggctggtggtcaggttgaacctgacgttcagaactacaggatcgcggtgatgatgaagtccagaatgaacagcagcgacacaacccagatcaccgggtgcacttccttggccttgcccttgcaggtcttgatcaggcagtaggtgatgaagccgccggcgatgccgtaggagatggagtagctgaacgccatgaatacggaagcgaagaacgccggcacggcctcggagatatcgccccagtcgatttccttcagcgaggacgccatcatgcagcccaccaccacgagcacgcctgcggttgcggcggacggaatggcggagatgaccggggagaggaaggcggacagggcgaagcagatggccacgaccacggaggtcaggccggtgcggccgccagcggcgatacctgcggaggattccacatacgtggtggtgttggaggtgccgcagatggcgccgatggaagttgcgatcgaatcggcgaacagggccttgtccatcttggaggagaagccggaaccgttttcgagggcttcctcgtcttccgcggagaagatgccggtgcggcggccggtgccgatgaacgtgccgatggtgtcgaaggtgtcggacatggagaatgcgaagatcgtcagcagaatgatcggcagcttcgacatgtcggagaacagcgatgggaagccttcagcgctgaagatagcgccaaaggtctgcggcagctgggcgaaagtgtcgccgatggagatggagttggccatggtggtctgacccatcggaatgccggcgatggcggtgaccgcgatggcgatcagcatgccgccgcgcaccttgagcacggtgaggatgatggcgaggaacaggccgatgatgaacagccagatggtcggattattcatgacggccagacctggggtggcctgcacggtgtcgccgttcttggcgtcggccttggtggtgaaggtgaagaagccgacgttcaggaagccgacgtaggccacgaacaggccgatgccgccgccgatagcgttctgcagcacttccggaatggcttggatgatgatcttacgaatcttggtgacggtgatgagaatgttgatcaggccacacaggaacaccatgcacagggtctgctgccaggtgaagccgaggccgaagcaaacggtgtaggtgaagaacgcgttgaggcccatgccggcggcctgagcatacggaacgttggcgaacaagcccatgacgagcgtgcccgcgatggctgcgatgatggttgcaaggaacacgccgccccacggcattcccgtttgcgacagtatctgtgggttgacgatgatgatgtacgacattgcgaagaacgtggtcagaccggccatgacctcagtggacacggtggtgccgttctccttaagatggaagaacttttccatttttccctatctctatttctcttgggttggtaggaacgttccgactattgggcggcgcgttccggcgagaattgcgactcgccttgtggaatcgtgggattccgaacaaggcttaaccgtaacacttgagtgagtcatgaagatttcgtaaagcgcgacacgcccggatgacggcaagtccaagcatgaccgtaagttgttcacctgtaaaccacagaccgttggttggagcgtgcaagcgctcacgaagtttggttcgccaagccaacgcaggttgaagaacatacgcccaccaagggctttccgcttagcggtcgaatgttgctctgcctgcgtgcagggcttttttattgtccggcgaaacgttcctgcttcacagtcaatggttgactaaggaaggaacgccatgaagaggcccgaaaaggaagcggtggtcgcccagcttacggataagttccgtgaagctgacgctatctacctgaccgagtaccgcgggcttaccgttccgcagatctctgaactgcgcgaaaagctaggccgcgatacttcctacactgtggctaagaacacgctgattcgcatcgcagccaaggaagctggcatcgaaggtctcgatgagatcctcgccggtccgaccgctgtgaccttcgtgaagggtgacttcatcgaagctgcgaagaccctgcgtgacttcgccaagaccaataaggcactgatcatcaagggcggcttcgctgatggcaccgtctacgatgctgaaggtgcccagaagctggcagacctcaagtctcgcccgcagctgctcgccgagttcgccggcgacatcaaggctacgatgtccaaggccgcgtacctgttcaacgctctgccgaccaaggccgtgcgtacgatcgatgcgctccgcgagaagcaggaaaaggctgcctgatttcattgcggttagccgcgtgaatgatagtgaccataaaagaaaaataattgttttaggtgacggtcacctcttcaatcaaaccgtcgccaagaatgaaaggaagccattatggctaagtacaccaacgatgagctgctcgaagctttcggtgagatgaccctggttgagctctccgagttcgtcaaggctttcgaagagaagttcgacgtcgaggctgccgctccggctgctgtcgccgttgccgctccgggcgctgctgctccggctgaggaagagaaggacgagttcgacgtcatcctctccgccgttggcgacaagaagatccaggtcatcaaggccgtccgcgctatcacctccctgggtctggctgaggccaaggctctggtcgacggtgctccgaaggctgtcctggagaaggccaagaaggaagacgctgagaaggctaagtcccagctcgaagaagccggcgctaccgtcgagctcaagtgattcgcgcggcttgaagccgcatatcacaatcttgagtggaaaccccgttcgccacaaggcggcggggttttccgcatattacgggattttctttcgctgacgatccaataaaatccgatttaggcatgaatgcttccatatcgtgccatacaatgggggaattaggcgaaagttgtcaattaatcgcgtcataatcctgaaatacgtggcaaggcatgacacaatgacaagtagtggtatgtgtgaaaggaaggccgacaacggtgagcgaagatcaacgaacggcacagcagtggaccgtcaaggttgatggaaccgaactgaagaagctgggcagcggcgaaagcgtggaaatcggccgcaagccgttacgtcctctggcggatgacggattcgcgcgccttgacattatggatacgaacaaatccatgtcgaaacggcatgccattgtttcagtcgacgcgcagggcaacgcttccgtacgtgatctcaagtcgaccaatggttcgtttgtagtggccgacaacggccaattgatgcgtctgcccgcggatgaggatttcaaactgccatccacgccaatgaccttgcaattcggcgacgtacgcgtcacttttgaacgtgacagcgtgagcgccatgcccgaatccgagagtaccgcgtcagctccggtatctaatctgttctcctatgcagtgtccgatgaggcgtcgcaggagcccgacgccgccgatatgtcggtcgacgacattctcaatctgcgtgccggagagccgaccgcattgttcaacgcgcgcaacgtcgccaatcgtgtgaatctcatgcaacgctccgaacgtcagtctttcgcgccagttcgatccaacgagccggattatggggatctcccatccgtttcgctggtgcagcataacgacgtcgtggataacgcgccacgtgacctcttcgccgacgccgcagccgaggcagatgccgtggcggaacagcaggcggcggaagaaggggccaagaagaacgccgccgaaaaggaaaagccggctatgctgcccgaatcccaatcgcggacgcaagccatcgcagacaacgacgtcgaacacgacacgattcccgtgagcaaactattcagcgcaagaccaagcaagccgattatcgtggcattgccggatagcagcgacatgcctgaacaacaagcggaaaaaacgcacgagcagcgcaatgaaattgcagaacaatccggtaccaatccgattcaaccggaagaagcggcgcaacgggccgacgacgagcgtttcaggccgcataacacggagcagccacagattgtgagcgagccgacaccggacgaaaccagcgtattcaaaccggcttttgaacccggatcggtgttcgatcgagtcgccaagggagagcttgccaagcaggaacagaccattgaagtcgacggactgacgtcggatgatgccaaacgcaccgacgatttcaccgtgcagttcgagatggcacgtcatccggagctgctgccgttccttgccatgaacccgtcgctgtacgacgatttgtacgcatggctgggagctttgggcaatgcagacatcgacgcggccctgtcacataatccggggtatgcggaataccgcaaagcggtagggaagtgagtcaatacatgagcgaaagcaacgagaccgtcaccgcgctggatcgtattcgggggtggcgtgagaagtaccgtcttggtctatcgccgtcgccgctggaggacgtgacgcagctgagcgcccagcttgacatgacgcatgcgcatccgtccggcatcgcgcagctgttcgccagcgggcatgtgcaacttgattccttgttccgcgacaacggcatgttgcgtgccgccgggcgtcgtgtggagcgtgtgctcgacgatcgtgaggcgaaaagccgtgtcagcggcgtgggcgaactgtctttggtggttggcgtggccatctggaaaggcaaccagatgccggtactcatgtatccggtcgaggtgcgcaaagaaggacgcaatattgaaaacggtacggtgatcgcgttcacagggcgcgtacgcttgaatgcggctttcgccgccgtgctgcgcgagaacaacgtcgtattggacgagtccaagctgttcgacggttcgaattacgaaagcggcacgccggaaacatccgcggtgttcgctgccatcacacgccttgcggccaacgcgttccctgattttgagatcgaacggcacattattctcggatgctttatggacccggcatcgcagatgctggtggaaagccggaagatcatcgaccagttggcgcaaggtccgaccggcaataccgccttggacgctttggcgggagacaagtccgccgccgaagcgttggaaggtgccgaaattccggagtacagtccgtttgatgccgatcctcatggcgagtatgaggtcggcgatgcggacaataccgtccgatacgcctcgcagcttgcttccgcgggccattcgctgtttgtggatagtgcgatcgccaacaataccgccgagcaggccgcggcgattgcgtcgcgttgcgtgatgaacggacggtctgtgctctatgtgccgtgtgtgaccgatcagaagcgtcgttttgtacaggccgttgccgcaaacgaaatgagcggacagctgctggatatcgccgatgatggtgccaacgctgcgattgaccgtcagctgattgcagccgtcggcttccaatcgggggttgcttcctcccgttttgatcagattgccgatgagctggttggcgtgcgttcgcgtttgacccgttatctgggcgatcttcacggcgtgagtcaggagtggggtgtatccgcctaccagacgattcagaatctcgcgcagattgcggcattgcccacccatccgaccacgcatgtgcgtttgaacaagcagaccgcgcactccatcgcggacaagatcgaggattgggctgcgaaactgcagcgtgcgggcgagcttggcgaatacaccattacggagaacgacaccgcatggtataaggcatcgctgtattccgaagaggaggcggtgagcgcataccagcgtgtggttgagctgttgcgcaaggtgttgcccgccacccgcgagcaggtggccagtacggtacagacctgcggattcccgattcccacgaccgcgcaggagtggagccgtcaggtcatggtgctgaagaacctgcgccgtgtgcttgacgtattccagccggagattttcgaacgtgacattgcatccatgatcgaggcgaccaagccgaaggccgagcgcaaggccgaaggtacgtccatgggcttttgggagcgtcgccgccacatcaaggaagccaagggtttgctgcgcgtcggtgcccaagtggagaacctgcatgaggcgttgctggtggtgtccaagcaggccgatcagtggcatatgttcgtgcctcatggcggctggccggtattgcccgccaagctggatgacattatcgaaacgcaggagaatctcaatcgggatatgaccgcgttgaatgcggtgcttgccacaaccccgcagggcggcaatcttgaaaccgttgatttcaatcaggtcgaagagcgtttgaaggccctgtatgacgataagcagtcgcttgatattctgcctgagcgcgcccgtctggaacgtgaattccattcggtcggcctcgacgagctggtcgaagatctgaacaatcgtggcgttgccaacgatgccgttgcaggggaactgcagctggcatggtggaccacggcgttcgaagacatcgtgaaatcctccgcgatcatttccaatcaggatgggtcggcattgcagggcgctgcggagcggttcgcccaggtcgatgtggaacatgtgcgttcggtcggtccgatggtggcgcaggaatccatgcgccgtctgtgcgacatgctgttctcgcgtacgcaggaggccaatctgctgcataccacgcttgccggcgcccgtaatgtttcgctgaactgcctgcataaggagcatccgcagattctcgccgcggcgaagcctattctcgttgcgactcctgccacgcttgcggccatcaccgatccggcgccattggccgacgtcgtgatcatcgatgccgcagcgcatattcaatccatcgaactgctcagcatcatcagccgagccaagcaggtggtggtgatcgcgcatcgcgaaaccgtcacttccgacggtctgaagcgtctcatcgcattgctgccgagcgtgaaaatcgccaatcgtcctgttcgccgtgcgccgaagctcaacgcgttcctggaatcggaaggctacggttccgtgcccttcgacgtggccagggaaggcgcgcagggcgaggtcgcctaccattttgtggccgatgccaatggcgtgccggtcatcacgtccggactggtggaaagcagccagcaggaaatcgacgaggtggtcaggctgatcaccaagcgtgccgccggtttcacgatcgtgcctgcatcgtacatgcttaccgtggtgacgctgacccatacgttccgcacccgactgggagccgagcttaaggcgatcgccaataagaacaaggccatgggcatgttcttgcgtcatgtgcgcatcgtggacatttccgatgtggccggcgcgcatgccaccgatgcgatttttgcgatgtgctacgcgaagacttctcatggaaggctgctgcaacagtttggagcgttggaatccgaaggcggacggggtatgttgctggatgcgttggccgtgccggatcgtcatcttgacatcgtgtccgcattctcgtcagctgacatggatgacgagcgcctgcaccaagctggtccgaagatgctgaaaacggtgcttcgctgggcggaacagctcgatgacagcgtggtgcgtccagtcgtcaagacgaacggttcgaacgtattgctcaacgatcttgccgaccgtattcgtgcccgcggtttgaatgtggccgtcgactacggtttcgacaatggttccaagctgccgctggtggttggcctgaacgacaagccgttcgcattggccgtgcttaccgacgatgcgcagttcatgggattgcagtccaccagggaacgccaccgcgtgcttttgcagaacatcgaatcgcttggctggtccgttatgaccgtgtggagcgttggcgcgttcgtgaatccagacaaggaagtggatcgcatcgtggcacgcttgagcgacctgtatcaggaggtcaagtgagcgtcgacgaaccctccatccaagagtccgcggaatctgaccagtctgccgtgcgtgtggtgtccggatactccgccacccgccgtacggcgcgcaaacacaagcgtgtggttcggcagggtacggaactgttcgatgccgatggcgtcaagcttgaaccgtccgatgtgcttaccgaacgccagcgcaatgctgacgacgacaagcgtattctgggcgagctgccaccgcattggggcgtgttctccgagcgggagcgctgacgttcgtctgctatacgggaggttctgatacgttcagacctcccgaatttcatatattccgcatgatggtgctgcggattcgcttgggaatgccgttacgaaccgacgatggcgatgatcgcgctgtattcttgggcctgcaatacggttgccgcctcatgaggaggcatggcaaacaccgcaagcgtgtcgccgtccgcattccgtgaaggtttcgcggtcaatatcgctcccgtgcacagctcacgtaacgacaccgcatccatatccggtaccgtttccggcgtggcctcgctgaacatcgtggcgctggaaagcgtcaccgtatcgccaatcgtcagactgtcggcggaactcgccaaccgaacttcgaccgccgtatatcctttgggaacaacgggggaagcgcgagccatggccgaggtgacgatgctgccttccgcaatatccacttgggcaatcagcccgacggcatcatcgatatcgtgagcaacgctgcgcagggcctcatcgtatggaatatctcgcaaagcaagcgaatccgcggaaatcacgccgcctttggcgatggacttcgccgcaatgacgacggattgcgtggaaatcgtcaatcgcacgcactgcagggccgcaaatatggcaagtccggcgcacagcgaagcaagtagacgatgcaattgcgcgtttcgtcgtcgtcgatgaggcgccgaagacggtgcgcggttcgtgtgtttgccgtccgtgccttgcagacgttggctaaggtcatgaaaaaaggtcaccattcatgcatgatgaccttacgaatagttgctgcgcaagccggatcgagggttgtggtcggaggatgcgagttatccacaggattcggcgtgtcgccttgttttccaaggtttgctgaccctggttatttgactcgtttccttgcttcggctgctcggttacgtgtattcgttttcgctcacttggacttgtcggtgcgatagaaaccagatcccttgaattcgatcggcggggcggaatacaccttgcggacctgctcttcgccgcatttcgggcaaacggtgatcggatcgtcggtgaatgactgctgttcggtgaaatcgtagttgcagttcttgcaacggtaatggtaagtaggcaaagtatcctcgcttcaaccaggttctcaaatttcttaacgggacatatcctagtacgttccctgagacggctgcgtgaacgtcttatcttcggacatcttattcgcgtatggccgtaaatccgttcggagtgagcacgccatcgacgggaatatcgtggtcttcgtgcggaacaggcttgtccgtcggctcccacggccagcaaaccgccaccacccgtgcgccggccgcacgatactcgagcgcgcggtcataccaccctccgccacgtcccagacggaatccctcttggtcgacggcaagggcgggaacaatgatcagaccggcgtttttcagcgcttcaggtccgtttgcgctattgcccggctcttgcgggcggtgcgtattgatggacccgtcgctgttggtctggtcctgcagatcgtgaatgtcgccaagttcgctccagccaatatccatgccggatccgagccgtggcgccagcacgtggcaattcgaatcgaataatgcctgcagcatcggcatcatcgacatttcgctgcccatggacgcgaatgcggccaccgtggtgaacgaatgaatgagattcgccttccgcgcctgttcggccaacttgcggccggcttccagtcgttcctccttactggtctgctttcttcgtgcgattgcgtgtgcgcgccattgctttttcagctcacgttggttcgcggcttcgtcacagacgctgttttccatgacgtcggcttgcatgttcgtggtcataccgcatgttgtaccacgggatggttgcgcgaaaacggaaatgttatgcgtatggcagaatgagggcgtgacgattttgcgatctttacggggcatgatgcgttcggatcctaatgccattgatgttccgcggttcattcaggcacatgggcttcacgttcccataatcctgcgtccgctgactactgacgactgcgacgaatggaacgaagtccgctggcgcaacgacgattggttgaagccttgggaatccggggatccggtgcatggcgcgtcgatgtcgttcaacgagtgggtgcgtgcgatgcgatgcaacgagcgaaacggcaccggagtggtgttcgccatcgagcatcatgggcgtatcgtcggccagatttcgttaggggccatctgctatggcgccatgcgtaccggcgtggttggctattgggtcgatgagcggtgtgcggggcgtggatatgcgccgatggctgttacgctattggctgattgggcgatgttcgacccttccgggccgcaattgcatcgtgtggagatcgacttgcttcccgaaaacgaacgttcacgtaaggtggcactcaaagtgggggcatcctatgaggggatgcgcaaggcgtacatgttcgtgaacgggcaatggcgtgaccatgaatcgtatgcgttgctgccggagtacgcaccgaatggctttaccgcacggttgatgggcgagtgagccgttggcgaggttcgacacgcgctttcgcgcacatgttcgacacgcgggggcgtgcaccccggagaatgtcggaatgtcacctattcttatgagttatgggttatgaatcgttaagcacggttgtggtgcttgcgattgtgattattctcatggttttctggctgcccaaacggacggtcaaaggcatgaagcgggtaatcgagcaccgagaggaccgcttttcgccgtcgctgcatctggtggatgccgacagtggaacgcgattctccgatgagaccgccgcaaaggcgaaaggggcaataatgcagtccaacgagacgcatgagggcaagctgaccgacgaaaggatcgcgcatgtccgtgcccttcgtcgtgccgcgatccgcagaaggcggattattgttgtctcgatgctggtgatcacaatcgtcgtgttgatgtgtgcgtttgtgttgcatttcagtccgttgtttgctttgattcctgcgtcgctgcttgctggagtgctcgctttgggggtgagggccgccaagcaggccgcagcgtgggagcggaaagtcaccaagtatcgttccaagatgaggaagcgtgctgcggcagagcgcaagcgcgcccaggaagagcaggcggagcgcgctcgtttgcgggagcaggagcttgcggaaattcgcaggatcgccgaatctcaggtgccgaccgatgttatgccggaaggtgagatccgtcaggcgatcgatcgcggcaaggccgaccgtgatgttgttgtaagcaaacgcaagggggaaaccgaagcgaaatccgctgcggaaccgaacgttgtggatgcgcaagtcgtgccggataagaagaacggtctgtccatccacgatgagcgtgatgaaatcgccaaaaccgagggtgtggatgcatgcgatgcggattcgtccgccgtggccggcgcgtcgcaggatctgatttcgttctcgttgggatcgccacgcaacggtaacgatatcgcgccagccgctccggaaagcatggaaatcaagtccactcgtcaggtcgccaaggccgtgcctccgactgcgagtacggtttccgacaatgtcgagccgttgattgtgccgaccgacgcgatcagcagcatggattccgacgaggccacagcccgtgtggaggctggtgtgcatctgcaggacgtggataccgtgggattccatgactccgaggtcagcgccgacgttgaagctcccagcgtcacctccgattccctgggtgtgggtttggcgtccatcatggcccgtcgcggggcgtgacggagggaaagcgaacgcacgaaacgcacgaaacatacgaacaagcgtaaagaacatcagcctgaaaccgcatggtttcaggctttttcgtatattttgctctcagcgttagcactcgagttggcagagtgctaataatcgcgctaggatatgtttcagcgcgaaaggacgacgccgtaagtgatcgtcagcctcttgctagcgggtcccggcgcggtaagtaacgatttctcttagaaagaggaggtccacagtgtcgatctcactcacaccgttggaagacaagatcatcgtcaagcaggcggaagctgaaacccagaccgcatccggtctgttcattccggacaatgccaaggagaagccgcagcagggtgaagtcctggctgtcggtccgggccgtcgcaacgacgccggcgagcgcattccggtcgacgtcaaggtcggcgacaaggtgctgtactccaagtatggcggcaccgaggtgcactatcggggtgaggattacctgatcgtctccgcccgcgatattctggccattctcggctgagcgtagcgcgtagctgtttgaaaaccccgtcagcgaacgattggtgagcaatcgttgcgctggcggggtcttgttgatttcaagcacttggggttcctgcaataggccgtgcgcggccgatgtatgccgtgttcattggcgttggcgtgctggtgttggcgtcgctgttcagatggtctgcagggaaggttcggaagaaatactcgtgttttttctttttggaatttttttcgggaggatttgctctgattgacaccgacatgtggctgatagtgagaaatcgttggaatttcaacgattttgagactttttggcttccgcgacacgccgtatttgcgttaatcgcatgatctgtggcatactaaacgggttgccggttggggttcaaccaaacaggcagcacggcggatttcccaagcggtcaaagggaactgactgtaaatcagtcgcctcgtgcttcagtggttcgaatccactatccgccacgcctcgatagctcagtggtagagcacttccttggtaaggaagaggtcgtgagtccgattctcactcgaggctctcatggcgggatagctcagctggctagagcgtacgactcataatcgtaaggtcaagagttcgagtctctttctcgctacaaaggtcgacggaacgtcggcatagcaacgaaccacaagaggtgaacttaaatggcaagcaagagcgccgacattcgtccgggcatcacgctggcatgcaccgagtgcaaggagcgtaactacatcacgacgaagaaccgccgtaacacgccggatcgtcttgagctgaagaagttctgctcccgctgcggcaagcagaccgtgcatcgcgagacccgctgagcgagttcaaagcttcatgaaacccgaccaatatggtcgggttttttgttttctttcaaccttttcttgacacctttccaactgccttccccgcacgctaagctaagcatcatgaccaatttcgcagatctcacgaccatcgccgtaggtggaccaatcgcatcctttatcgaaccgacctcgcgtgtcggcgttatcgaagccgtcgaggatgccgacgccaaaggattgccgctgtgcgtgatcggcggcggatccaatatgctcgtggccgacacgccgttcgatggtgtcgtggtgcgtgacgcgcgacacgccgtaagcgtgcttgatgaggcggctcccgtcgaaaacggcgaaaaaatcgtgcatgtcaacgccgaagcgggttgcaattgggatgatttcgtcgactactgcgtcaacctcggcttggagggcgtggaaggactttctggcattccaggcactgtcggcgcgtcggtcgtgcagaatatcggcgcatacggccaggaagtcgcatccagcgtcgaaagcgtggaggtctgggatcgcaaaaacaagcagaccaaggagctcaccaatcaggaacttcatttcggctatcgcatgagcgcgctcaaagcgagcatgtacagcgctccggcaacgcctgcggccgacttcttcccgacaccgcgctacgtggtgttgtccgttactttcgcgctgcatcacagcgaaaccggcgtagttggctacggccagctcgccaaagcattgggcgtggaagtgggcgaccgtatggcgaccgcggatattcgcaacgccgtgttgaaagtacgcgcctccaaaggcatgcttgaagattcccatcgatatctgaccgaagccatgcgaggcaccaaaaagagcgaactggtcgccatcgcgcatgacgcacagcgcacgcagacaggcaacgatgaccccgactacaatcgccacagctgcggcagcttcttcatgaatccgattctcaccaaagaacaagcggcaaagcttcccgaagactcgccacgattcgacgcgaccttgccggatggcacgccgggcgtcaaaacatccgcggcatggcttatcgatcatgcgggattccataagggctacaaaaccagcggaaatgccgcagcggggctttcgaccatgcatacgctggcattgaccaaccgcggcggagccacagctgcagatatcgcggaacttgccaaaaccgtgcaggatggcgttgaacgggcattcggcattcgtctcgttcccgaaccggtcgtcatcggcatgagccttaagtaaacgtaagaacgaagggagaagggaaacgcaatgaacgtattacgtaagaaatccgtcgagcagacgctggcggaaacagaggagtcggggcgctccctgaaacgagacctgacctggtgggatttggccattatgggcgtggccgtggccgtcggcgcgggtatcttttccatcggcgcgcaggcggcagccttccatgcgggtccggccgtgatcatcagtttcctcatcgccggcgtggtatgcggtgcggccgtaatgtgctacgccgaattcgcgtccatgattccggttgcgggatccgcctacaccttcacctacaccaccgtcggtgagatcgtcgcgtgggtgatcggctgggatttgatccttgaaatgctgatggcaggctccgtcgtctccaaatattggggcgtctatctcaacgatttcttccgacttgtcggatggaatatcaataccaacgtcaccatcggatcattcaatttcgatttcgcgccaatcatcgtcgtagctttcttcacggcactgctggtgtgcggcacgaaaatcggcgcacgggtcgacggcgcgcttaccatgctgaaaatcgccatcgtgctattcgtggtaatcgtcggattcttctacgtcaaggccgagaacttcaccccattcattccaccgagcgaaccggcgaccgccaccggatccgggctggccgcaaccatggaacagccattgtggcagtgggccaccggcatgacccccagcatttacggcattgccggcatcatctccggagccgcgctcgtgttcttcgcgttcctcggcttcgatgtggtcgccaccacttccgaagaaaccgtcaatccgaagaagaacgttccgctgggtataggcgtgggcatgggactgatcatcgtgctttacaccctcgtcgccatcgtcaccaccggcatggtctcctacaaagacctcgccaagcagaaagatccgtcgcttgccacggcattcgaaatggtcggcgctgactgggccgccaaaatcatcagttttggcattgtgatcggcctggccaccgtggtcatggtgctgctgctcggcctgacccgcgtggtgttcgccatgagccgagacggcttgctgccgcgctcgctcagtcacacaggcaagcacggcactccagtgcgtctgcagattgccgtcggcgtggtcatggcactcatcgcagccagctgcaacgtcagcatccttgccgacatggtgaacatcggcacgctgtcggcattcacccttgtttcaatctctattccgatcatgcgcaagaagcgccccgacctgaagcgagtcttcaaaatccccggcaatccatgggtgcctatcctcatcgcgctcgccaacatctggctcatgctcaacctgagcgtgctcacctggattcgattcgtggtctggcttgcggtcggcttctgcatctacttcggctacggctaccgccacgcccgacttggtacgggagagctggaagttggcaatcaagagtagtcttgaacggtaagtgttaaggaggtaaccatgccatacgttgtcgctcagccgtgcgtcgatgtcaaagacaaggcctgcgtggacgaatgcccggtcgattgcatctacgagggctcccgttccctgtacatcaatccgaacgaatgcgtggattgcggcgcatgcgaaccggtgtgcccgactgaagccatcttctatgaagatgatctgccagacgagtgggcctggtacaaggatgccgcagtcagcttcttcgctaaagtcggcgatatgggcggcgcttccgcagccggcccgatcggtaaggatccggagcaggtagctgctctgccgccgcaaaatcagtgatcggcatttgaaagcggccttttcccgttggaagaggccgcatattttttgtttatagaggattataaggagttttcacgatgggctttcatgagttttcttcgccatacgattggtcgcgtatcgcagcatacaagcgcacggcaaaagccgcgttcggaggcatgatcgacctgtccgtgggatctcccgtcgatcccgtgcccgactcggtgcgcaaggcgctcgcagtggcggcgaatgatccgaatgcgtatggatatccggctactgcaggtactgccgatttacgtgccgcgattgctgaatggttttcggcggctcgcaatgttgatttgcaggcgatccatgctgatgtggtgcctaccgtcggctccaaagagggtgttgcgttgatggcgtcgctactgcatttcggtgaggatgatgttgtggtgcagccgaaggtttcgtacccgacgtatgagatcggcacgcagttggctggagcgcaggtgcttaaggtcgacgatgtggctgatgttgcgtcgtggcgcaatgtgcctggcatcaaagcggtgtgggtgaattccccttgcaatccgacgggcgaggtgtattcggccgagcggatggctggcattgtcgcagctgcgcgtgagatcggcgcggtggtgctttccgacgaatgctatgcgctgatgcagtggaggggtgctacgaatggcactgaaggtgaagctgattcacttgcgtcgacgccgtgcgcgctttgtgacgatgtgtgtttgggctccgccgagggcgtgctggtgctgtattcgttgagcaagcagagcaatatggctgggtatcgtaccgcgttcattgccggagatgagtctttgattgcatcgatgagtgcatatcgcaagcagattggtcagattattcccggtccggtgcaggctgcgatggctgccggactgcgtgatctggaatccgtcaaggttcagcatgcgcgctatcgggaacgtctcggcgtgttggtgagcgcgttgcgtgcttacggatactgcaccgacatgccggatggtgcattgtatgtgtgggtgagagccaagtcgggcgattgctggaccgatatggagcagcttgccaagatcggcatcatcgccagccccggcgagttctatggtgcgccggaatgtctgcgtttctccgccaccgccagcgacgaggcgatcgcttccgcagctgagcgcttggcgcgctaagccgatatgcaaaagggcttccggcaatcgctggaagccctttatcggcggagtcagagggagtccaacgcccatgcgtcttatggctatgcgcagctgttgatgtcgctgatccaggagtggcgtgcgctgttcaagcgtccggaactaccattcatattcgcccaattgccgaactgtactttggaacccgattgcgattggccaaggctgcgtgataaacaacggcgcgctttgacgttgcggaacacggcgatggtggtgacgatcggatatggagaggacaatgacctgcatcctttggataagcgccatgtcgcgcagcgcttgacaacggctgccgagtcgttggtttatggacgtgattgcgagccgatggggccgcttcctgtcatggcgattcacaaggatgacggcattgagatctccttcatccatacgggagggggattggtctgcacgggcgacgtgccttttgacatcttggagccgggaggctcgatatatcgggtgaaggcttgtcggtacgattgccatggcggtcacggaaccgggcgtgcgagtggcgcagtgagagagctctccccagtacagtgtcagtttgtcggccaataaagcatcgatgataacgctattgccggggacagcgtaaatagttttcgcagttaatcgtgtttgggcggaagcctgtaatttcctgcttttggaatacttaaatctattcgaaagtttcgtaaatatttgcatatagaactttcgtaacaaaaattttaagtatttagttaagtgacttgactttcttgaaaatcaagtcatataatcaagcaatgctttgactgaaatgctaaagcatttacgaaacatgaagatgtgtgttcgtgcatgtcgccaaaggagaaagactttgtattcccacatccgatattggataaggagattcagcaatgaagtttgaataccatgtcaaaccaaccggcagcgatgctgcgtgcggcgacgcggagcatccgttcgccacgatttccaaggccgcgcagatggcctctccgggtgatacggtaatcgtgcatgaaggcgtataccgcgaacaagtcgatccgaaacgcggcggtctgagtgaacatgagcgcatcacctactgcggagccgaaggcgaagcacggccggttatcaaaggctcggaatgcgtgcagggctggacggaattggccgatcatccgcatgtgtggacggtggtgcttgataatacgatgttcggggatttcaatccattcgcgaccccgattttcggtgactggctggaaatgcccaagttcggcgaggatccggacaaacatcttggcgatgtgtatctcaacggtgtttccttcttcgaatcgacgacgttggaaggcgtatacgatccgcagccgcgtgatacggatgaggatttcgcgttgaagattccctgccctgtgccggatgtggaccgtacacgttatgtatggcatgccgaagtggacgagaatgccggcaccacaacgatctgggcgaatttccaaggtgccgatccgaatgaggaactggtggaggtcagtgttcgtcgcacatgcttcttccctgcccgcaaccatgtcaactacatcaccgtgcgtggctttgaaatggcgcaggccactggagattgggcgccgcctacctcgcagcagtggggcatgatcggcccgaactggtcgtatggctggatcatcgaagacaacgtgctgcatgacgccaaattctccgcggtgtcattgggcaaggaaatctcatccggcgacaacgagtgggcgaaaaccgagcgtaagaccggttaccagtaccagttggaggccgtgttcaaggcccgtcgcatcggctgggaaaaggggctgatcggcggtcatatcgtacgcaacaacgacatctacgagtgtggacagaatgccatcgtcggacatatgggcagcgcattctgccgtatcgagcataaccatgtccatcacattgcgttgaagcgtgaattcttcggatgggaggtcgctggcatcaaattccatgccgcattggatacggtcattgccaacaacaacatccacgactgctcgctgggcatgtggatggattggcagacgcagggcacgcgcatcacgcgcaatgtgttccacgataacgtccgtgacctcatgattgaagtgagtcatgggccgtatctggtggacaataacgttttcgcctcgccggtgatgttccagaactggtcgcaaggtggtgccttcgtcaacaatctgatttgcggcggcattgaaccgcataccgtccctgaccgttccacgccgtatcactatccgcacaccaccgaggtggccgggtgcgctgtggtgtccggcggcgatgagcgttggctgaacaacatgttcgcgccgcaaccggtgaaaccgactgtcggtgaatatggtttgtccgcctacagcgattgcccgatgtcgatgcatgaatacttggaacgccagcgggccatgtgggcagatccttcgcagggtggtggcgagcgcaatcctctgcagtctctatacgcgggcggcaacatctatctgtccggcgcacaggggctgaacaagcaggaaggtacagccgacgattcggagcgcatgcaggaggacgccccgttcttcggcggcaccgcctccacgagcgttgcgtgtgatgagcccatgccggtgacattggtcgaagaacccgatggactgtacctgcggtgcactgtgccacaggccgtcgccgataccaggatgcaggtcgtcaccagcgatatgctcggcgtgcctcgcatcgtggaggaacgctatgaacagcccgatggcagtgactatgtgctggacaccgacttgctggaacaagccttgacggcaacggaacgcaaggccggggcgttgaatggtcttgtctccggagagaatcgcatccgaatctgggaatggaacaactgatatgacaaatgcaaccgataccaacaagacattgggcgagtccatgttcgcacagtgcggatatgcccaagacgccatcgataagcgcgtgtcacaggtctggcatgaaattttcgaaggtccgaacaaattctattgggagaacgacgaaggtcttgcctatgtgatggacaccggcaacaacgatgtacgtaccgagggtatgagctatgcgatgatgatcgccctgcaatacgaccgtaaggacgtattcgacaagctgtggggctgggtaatgcgtcacatgtacatggaggacggtcatcatgcgcattatttcgcatggtcggtcgcgccggacggtacgccgaactcgaatggtcctgcacctgacggcgaggaatatttcgcgatggatctgttcctcgcctcccgtcgctggggtgatgacgaggatatctacgaatattccgcatggggacgcgagatcttgagatattgcgttcataagggcgaacgctacgacggcgagcccatgtggaatcccgacaacaagctcatcaagttcattccggaaaccgagtggagcgatccgtcctaccatctgccgcacttctatgaagtattcgccgaagaagctgacgaagaagaccgtccattttggcatgaggcagccgccgcaagccgtcgctatctgcaggtggcctgcgacgagcggaccggcatgaacgctgaatacgcggattatgacggaaagccgcatgtcgacgagtccaatcattggcatttctattccgacgcctaccgtaccgcggcgaatatcgggctggatgcagcctggaacggtccgcaggaagtgctgtgcgaccgcgtcgccgcgctgcagcgattcttcctgacccacgaccgtactagcgtctacgccatcgacggcaccgccgtggacgaggtcgtgctccatccggtcggattcctggccgcgaccgcgcaaggcgcacttgcggcggtgcattcggcccagcccgacgcggagcataatgcccgtgaatgggtgcgcatgctgtggaatacgccgatgcgaaccggcgcgcgtcgttactatgacaatttcctctatgctttcgccatgctggcgttgagcggaaagtatcggtatgaatgatgattacctcaactaatcctatggtctacacggattttcctgatccagacatcatccgggtcggggacgtgtattacatggccactacgactatgcatttcacacccgggtgcgatattctgcgcagctatgacctagtgcattgggaattcattgcgcacgcattgaatatcgtggcggatacccctgaagaacgtttggaatgtgaaggtgccaacgcctacggtcgaggcatgtgggcgccgtcactgcgttaccatcggggcacctggtatgtgttgttcgccgccaacgatacgcatgccagctatctgctgacggcgaacgatccatgcggcccatggcgaaagcgtgagcttgacggcttctatcacgacagcggactgttctttgacgacgatgatcgagcctatgtcgtacatgggcagtcgacattgcgcatcacggagttgaatcctgaattaagcgggccgatgccgggtgggctcgaccgggtcatcgtgcaggacgatccgcaggctgaccttggttatgagggcagtcacctgtacaagcatgatggacgctattacgtcttcacctgtcacttcccgcaaggcaagggcaaaacagaagcctgcttgatggccgaatccttggatggcgctttcgaagtgcgtgaaattatcgacgacgacctgtccttccacggttacggagtcgcgcaaggcggtatggtggacactccggacggcgactggtatgcattcatgatgcaggaccgcggcggtgtgggacgcgtgccgatactgatgccgatgcggttcggcgaggacggattccccgtcgtcggcgagaacggcaaagtgccgcagtcggtcagcgtgccggctgcaagctgtgccgaacctgtcacgcccatcaacggcagcgaattcatagcccggcataacgccgaaggcggagtcgatgccaactgtctgcagccatactggcagttcaatcacatcccacataacgaatactggtcactgacggaacgtccgggagcattccgcctgcattccggacgcatcagctcgaatctcaatcatgcatggaacacgctgacgcagcgcacgatggggccggtgacggtggccgaagtcaccgtcgacgcgtcgacattgcatgatggcgacttcactggattggcggcgttccaaggatgctattcctacatcgcgcttacgcgaaggaacggccgcacgatgctgaccgtccaatacaagccggcgaatgacgattccatcttctccgacgatgattgggacagtccagccgtaacggatgcggaaatcatggcggatgcggattgcatgcgtctgcgcgcggtatatgatttcaccgattgcaaggatgaagtgacgttcttctaccgcgatgcggatacgccggaatccgaatggtgtccattggggacagcgcaccggatgatcttcaaaatggatcatttcacaggttgccgtatcggattgttcctgtattcgacaaaagagaccggtggaatcgccgatttttgcgactttgcgtattcgacgccggatacgaaggaaagagagcaatgaagcgacaggtcatagtggcgcaaggaactgtcgaaggcttggcggttgaagatcagggcatcaccgtgttccgaggggttccgttcgcccagcctcccgtcggcggtctgcgctggcgtgcgccgcagccggccctgccatgggatggtgtgctgcaagccttcgatttcgggcctaccgcgatgcagccgacgccgggcgcctccgatgatttctatgatcgtgaatggggcaccgatccggccgtgccgatgagcgaggattgcctctacctgaatatttggactccggcattacgcggatatggtgcggatagcatggtagcctccgagaagctgccggtcatggtctggatctacggcggagcctatcaatgcggcggcacatgtgaaaaggaattcgacggcacacgtctcgcagcgaacggcgtcgttgtggtcagtgtggcctatcgtctgaatgcatttgggtttatgacgcaccctttgctgcatgaggaggccgtagaacgcggcgacggcgaaccatatgcgaatttcggattcctggatcagcgtgccggaatccaatgggtgaaggaaaacatcgcgaagttcggcggagatccggaaaacatcacggttttcggccaatcggccggtgctgccagcgtcttggcccagatctgctcgccgatgaatcatggcctgtttcagaaagccatcatgcaatccggcgcaggcctagggtatttcaatgcgcggcaggacacgctggagcatgcgcaggccaacggaatccgtctgttcgaagcattgggtgtctccacgctggagcaggcccgtgcaatcccggcccgaacggtattggaagccgccgagtccctgcctgttccaccggacagcggacgtgaagatgactggtcgatgatcgtcaattgggtgccatgcgtggacggcctgttccttcccgatcaggaggagcgtatcgtcgagggctgcaaggccaacaacgtcgacatgctggtcggcaacacgaccaatgagttcatcgcttcgactgaagatgggaagcctgtgcatgtcggccagctcggcaatctcacgctgatccgcaaatggaccgcaagcggtgggaccgcgccatactactatcatttcgatgtcgctatgccgggggatgatgccggagccttccactcgtccgatctgtggttctcctttggaagccttgcgaaatgctggcgtccgttcgttggatggcattacgatctggcaaggcgaatggggctgtactggaccaattttgccgccaatggcgatcccaacggaacagaccgtgacggaacgccgcttcctgtatgggatccttgcatcggtgaggaatgccccgccatgcatttatgccaagaaccgggcatgcggacggattggcttaccgaaacggatcgaaaagcattcggcctgtgacggcatgccgttgatgtataaatactgatatgtaaacagggacggtctttgtggaccgtccctgccgcataatggtttgccgttgcgcgtgcaggaggatttcgagactcattatccgacttttcaccgtttccgtaggctggttcgtcggtggcgtctcgcggaggctcagagcatcaaagaccctgttcggtgtcgtgcggcttatttgtgaggctaggagttgtttgaagtgtcctaggccggatatttcgccgtataggggcgtttctgcgtggattccgtcggatgtggcgtctcaatcgttggacgtggcggtgagcgtgaacgggggtgattatgaggaagactgaactcccctgctcatgactagcgcggacactatggcgtatttgcagtgcagtcgtcagcatgtcttgttgggtactcaactcgggtaccttgctgggtaccggaaatattgacattggcgtacatttccgtacattctctgtttgtgccgtatgtcttgaaatcgttggtattccgccgttttggcatgaaaaagggcttccggatttctccgaaaaccctcaaggcggagtcagagggattcgaaccctcgagccgctaaaaacgactaacaccttagcagggtgcccctatcggccactcaggcatgactccactgttttaccgttttcacggcgcaacagcatgcaactataccatccatttgcgggcaaaacaccatatctcgcaaaaaagatgagaaaacgttgaaatttcaacgaaaatacgtgttgtgggattgtgctgccatgctggtttcgggtttgccgacacgccgttgcgttaaggtgcggcactatattcgaacatttgtttcaatatcttgcgaaaaacggttatcatggaaccatgagcaccgcaccgagaatcgcagcagccaaacgtgactggggtcacgacgaggctggctgcacggtgctgcacatcgacatggacgccttctacgcatctttggaggtggcgaggcatccggaatatcgcggcaagccggtgatcatcggcgtgggcaaccgttcggtggtgtccgcagccagctacgaggctcgccaatacggcgttaattcggccatggcgagttccagggcgcaaaagctctgcccgaacggcattttccttccggtcgacatgcgctactatcgcgcgatgtcgcatcgcattttcgaggaagtgttcagtcggatcaccgatcgtatcgaacaggtatcggtcgatgaatgctatatggacgtttccggggcgctgttgcggtgggggagtcctcgcgccattggggcgtggattcgcgaacaggtggtttcgcgttacaacgtcacctgttctgtgggcatcgcggcaaacaagctggtcgccaaaatggcatccaccaatgccaagcccaacggcatgcttatgattcctgtggcgcggcatgcgcaattcgtgcagatgatgccattgcgtggcattcccggcattgggccttctttggagaaacgactgaatgcgtggggcgtcaactccgttgccgatcttgcgcgtatgagtcttgaatcgttggaacaggctactggatcggctatttccgcgcgtgggctgtatcaggcggcccgaggactggatggtagacccgtcgtgccgtatacgcaggaaaaatcgattggcgcggaacgcaccttcgatgtggatacgcaagacatgcggcaggtgtgctccatgctccgctggtgttgcgatgacgtggccacgtctttgcgcaggaggggtttcctcgctcgtaaagtcatggtcaaacttcggtttccggatttgagctacgcaacaaaagggcacacactgggctgtcctacggatgcggcgagcgtgctctacccgcaatgtgccaatctgctgctctccatgatgggcatggctccggagtctgcgcatgccatttcccttacgcgccccgtgcgtttggcgggaatgagcgccagtgggcttgtacttgccgaagaagctgtgattcagccttcgctggatgatctgctcgaagaaaacgaagtcgaacagcgtgctgaaatctccggcggcagcgcccagtcgcagacgcattcggcgcgtttgcgtggcgcggaggcggcgcttgatgcggtgcgtcgaaaatacggtaacaatatcgccagcttcggggtgtagaagcaagggcatatccgttattcttgaagtgatgagttgagaaggcccagaggaaggcaggggcgccatgaaatacaggaaagaggcggtgcacgcgaccaatccggaagtgcttgcggccggccgtcgcaaacttgtgtttgcggcattggcggtgcttgccgtcgtgcttgtggcgggaacttggctgttggtacatagtcttcaaccgaagcagaacgatgctgccgtgaagccggagatggcggtaagccagccgaaaacggttgaaaagaagcagacgactgagcctgcggagcatcatggcaattctccggattgccccgacaccgactgcatcgccatgcttgtcaacggtgatctgctgttccacgaggggctttggaaccagtacgccagcaccaacaccgcggccacggatggcacggcattcgactttaccggcttgttcgagccgatgcgcaaatacattgatgcatccgacattgccgtatgcgaattcgaaacacctatcgcgcagcgaggcggtccatatacgggctatccggtattcaatattccggcagaagtggccgacgccgcgaaaaacgtggggtatcgcgcctgcacgcatgcgtcgaatcattcctgggaccaaggtgctgacggcatctcgcgcttgtgggacacacttgatcaggatggcatcgcccagaccggctcctataaaaccgaagaggattcgtataagccgttggtcatcgattcgcctaccggtggcggtaagcttggtctgattgcgggaaccgtgtcgttgaacgcgcagacgcctgactacgactggcgtgtggatcgtctgcgtgaatccggagacccgaaccaccaagccgatatcgacaaggcggtagccaaagcgaaggccgctcgcgagcagggtgccgatgtggtggccatagccatgcattccgtgcaggagtatttggattacgctgattcctggcagcaaagtgaggctcatgaactggccgataccggtgcgttcgacgtgatttatggcgctggatgccattgcgcgcagccggtcgagaattacaacggcacttggatcatctacggtttgggcaatgccgtgaccgaatcggccaatactgcggacacgttggtgaacaatcaaggcattaccgcgcgtattcaattcgcgggcaagaaaggcgtggccggttcgtggcgtgtcaaccgcattgactgggtgcccagtgccaacgaaacccaaggcaaataccaatggtgttcccttgcaagcgatcatcctgacggcacctgctgggacgaaacgcaagacgccaatgtgcgccaacgcatctgggacgtgctctattccatgggcgccgatcagaacgtggtcaaggaatggaatattaccgcggagcaaacgagttcatctggccagtagttttccgtggcacaatatgcctcataccgtgagtcgcatatgcgtaagaactctcgaacatacaatgtgaggtgaaaacatggaaatctacgaaacccaaccggaacgcaccgatctgccactggtggtcatgcccgtcatcatcgaatcgatgatcgaaccgttcgaaaagaacttcgaactgctcaaagacattgcccgcgtgcgcatgtacaaggatttcacgcttgacgaagacaccatcgtcgaacgttgcgccgaagctgacgccatcatggtgatcggattccactgcgccgattccatcctcgatcggttgaacgccaaatgctatgcattcggcggcaccggcgtggccagttacatcgatctcgacaaagccaaggaacgtggaatccgcgtatgcaatgtggtgcactatggcgaccatgccgtggccgaacacaccatcgcactgcttatggaactcgccagacaggtcggcaaactcgacaggcaagtcaaaacaggcgattgggacggtgccgacggctacgagctgtacggcaagaagcttggcatcatcggccttggcggcatcggtcagaccgtggcgcgcatcgccggagctttgggcatgaacgtgtccgcatggaactcccatgtgccggagcaggtgttcgccgatctgaatatcactccagtcaacgatatgaacgagctgattgccggttccgacgtggtatccatccatatgccgctgctggactccacaaaaggcatcgtcactgcggaaaacctcgaagctctgaaaccgggaaccatgttcatcaacacggcccgtgcggaaatcatcgaaccgggcgcattgctcgccagactccagcgaggcgacattcctgcggcgctcgatgtgttcgaacacgagccgctcactgccgacgatccgctctgttcgattccaggcatcatcctcaccccgcacaccgcgtggcgcaccgatggcgcctatgtgggcatcaccagacaggtggtccaatccgttgcggcattctgcaagggcgaggatttcaacgtcgtcgtgtgaataaccgcaaaaccggtatgggcaaaacatgtggacggtcggcgtgattgggtaggttgaaagacatgcagaccatactcgattccgccgatcagcccgcgcatgatgcgttcgtcgagaaaaaatcggaattcatcggcgacgcctgtcatatcgactccttggatgaggcgctcgcgtttgtgcagacgattcgcgaccagcatccgaaagcgcgtcatgtcgcctatgctgcggtgtgcggcggctccgacggtcgtttggccgaacgcatgagcgatgacggcgagccatcgggcacggcgggcaaaccgattcttgacgtgttgcgcgccaacgagatgacggattgcgtggttgccgtcacccgatatttcggaggtattctgctgggttccggaggcctgatccgcgcatattccacgggtgcgtccattgcggtcaaagcggcgaacaaagcgaagatcgtgccatgttgcgaatatcaggtgacgcttgactatccgcaattgggaagctttcagaatctgcttgcgtcagtggacggcgagcaggcggatgcgcaatataccgatcgcatcgtgctgtcaattatcgtttcgcaggaacaatcgcagaaattcaaatcacgaattatcgaaacgttcaatgcgaccgtcacgccgcggcaaacgggcacgtccaatcgcccggtgcgatactgaaatccaacgatgacgaatggaatattgagcagaacataacgtaaggtggaacgcatgaccgaagatatgagctcgcaagacactactgccgtggaaaccgccgaaaataccgtcgaaaccgttgtggggaacgccgacgaacaagcatcaaaccaagaggttccttcggatttcgagcctttgaccgcaacctacgagcggttgcgtcactccacggatgccgccgaattgagcgaattcgcgcgccgtccgctgcctgaccgttccgaacaggccgctttctcgcgtgccacggcattgctggaagccgtcgccggcaatgcgcatacaccgttggaagatcgcgtttttcttgcggaaaccatgccgtttccgaatattctcgtcaaactgtccaccgacgaatccgttgaggtgcgcaaagctgttgcgggcaatgccaatgataagaattggctggtggggcgtctcaccaaggatgagtccctcgaagtgcgcgatgtcgcgttgcgcaacaagcagacgtcttggaagatgcggctcgaaggcgcgcaggatccgggtatggattccacggcccttgattttctgggatctttgggggtcgacgtcgagccgaatgctcctgccgtgcttgcttccatggtacgtagggccgttgctttgaacccgaacacgtctgatcagatgttggaaaaacttgcgcaggatgcgtcaggagaggtgaaaagggccgctgaacggcatctttcggaaaaataattgcatacgttgtcatttttatgagatttttgcgcgtggtgcatgtgattggggcatagactgttgtttatgacagaacagaccgaaaatgcaacgcgtctagcccgtccgatcattcgcctggcaaagttggtgggtatcgccaccagttacgtcggcatgagccgcgactaccacgaaatcgaagacgatgttctcgtggcggtgctcaaggcgctcggaatcgacgcttccaacgatggggcgatcgagcagtccatcaccaccattcagcgcgaacgcgacacacgtatcgttcctccgaccgtgctgcacgttgtcggcaaggaaagcaaggttgaggttcacggcggagcgcttgacgttcctgaagcttccatcatgctggaagacggtggggcgtatgccggcaaaatcgagctcgagggtggcagcgataccgtggtcgaggtcgacggcggcttcgtgtgcacctcatatctggtgcttccggcagatcttcccgaggggtatcacacccttgaagtcaccgttggtggcaagacggagattgcaaccgttatcagcgctccggaaaagatcgagctgcttgacgacatgaaggaaggctccctgtggggctggatgagccagctctactccattcgttccagcggttcctggggtatcggcgactatgaggatctgaagaccctgctcgtcgagtccaagaagaagaccggcgccgacttcatgctgatcaatccgctgcatgccgccgaaccggtgccgccgatcgagccatcgccgtatctgccgatttcgcgccgtttcattaatttcagctatattcgaccggaatccatgccggaatatgccgtgctttcgccggaagacaaggcgaaagtggatgaactgcatgagcaggtcaagccgctcaacggcaatgcgcggatcttggatcgcgaaaccatgtggcgtaccaagatgcaggcgttgtggatcatctacaagtccggcctttccgcacagcgtcaagccgagttcgaccagtatctcgccgaagtgggcgatgagatcgaatcctatgccacatggtgcctgtgctacgacaagtggggcgcctcgaatggcagcgacgacgattgggtgcgcaagtacaatcgtgattccgaggaagtcgcgcagcttcgcgcacagtacccggacacgcttgaattctatcgttggctcgaatgggtcgccactgagcagctgcatgcggcccagcaggcggcgcgcgaggccggcatgaagatcggcatcgtcgccgacatggctgtgggcgtgcatccggccggttccgacgtgtggtggaacccggagcgttttgccaagggcgccacggtcggcgctccgccggacatgttcaaccagcagggtcaggattggagtcagccgccgctgaatccaatcgctctcgaacagaccggctacaaggtgtaccgagatatggtgcacggcatgttctccaatgcgggcgcggtacgtattgaccatattctcggcttgttccgcttatggtggattccggaaggcaagaaagccatggacggcacctacgtgcattacgattctgacatcatgctcggcattctcgcattggaagcatcccgcgccggtggtgtggtcgtgggcgaggatctcggcgtggttccggcatacgtgtccaagtcgctgtccgagcacggcattctcggttgcgctgtggaatggttcgagcagttcgacggcgaattccgtgcgccgaaggattggcgtccgtatgcgttggcatccgtcaacacgcacgatttgcctccggcagccggctacttggagtacgggcatgtcaaattgcgtgaacagcttggactgctgtccggtccggtcgaagaattccagaagtccgcggaagccgaacataacgccatgctgagcatgcttgtcgacgaaggctatctcgacgcttccgcgctggaagacgagcttgccaacgaaaacgagatcatcgacgcgctgtaccgcggtttgaagggatcgccatgcaagctcatggcggcgtccatcgtcgacgcggtcggcgaaaagcgcacgcagaaccagccgggcaccagcaacgaatatccgaactggcgtattccgctggctgacggcgatggcaatgtcgtgccgctggagcagttgtttgacaatactcgactgcaggagatcgcagcgattatgtgcggctgagcttgcagcggattgaggctgattgcagctgatttcgattggcggaaggccggcgatgcaaggtagggagacctgccaagcgtcgccggcttttgcgtgtcgattgctgtgtttccgtattcgcaagtactaggggttgatgtgtcgcgaatgtcaaggctggcgatatactagtagattgttgtgtttccctacggggtccttcaaagcgcttttcccactcgccatcgaggactttcagggagcccacggataatgagacctgaaaaaggcatcattccgcgcctaaccaacgcagagatgttgatggaaggtccggaacacaatatatagaaaaggtacatcgtgaaaactttcactccgaagccagctgatctgactcacgactggtacgtcatcgacgccaccgacgtggtgctcggccgtctcgcttcccaggcagccatcctgctgcgtggcaagaacaagccgacctacgctccgcacgccgattccggcaaccacgtgatcattctcaacgccgataagatcgctctgaccggcaataagttgggcaaggaactgtacatgcactccggtcgtccgggtggcctgcgtcgcgatagctacggcaagctgctcaagaccaaccctgagcgcatcatcaagtccgctatcaagggcatgctgccgaagaatcgtctggccaaggtccagctggatcgcctccacatcatctgtggcaccgagcatccgtacgctggccagaagccgcaggttttcgagatcgctcaggtctcgcagcaggctaagtgaaccgaagggagataagaaacatggctgaaaacaccaacaactccgcggttctcgagaccgaagaggagctcacctcgtacaccaccgagaccaacgctggcgctggcaccggtacttccgctatcgctccgggctatggcaccggtcgtcgtaaggaagccgtcgctcgtgtccgcctggttccgggcaccggcaagtggaccatcaatggtcgcaccctggaagagtacttcccggccaagctgctgcagcgtgaggtcaactccccgatcgtgcttctcaagctcgaaggcaagttcgacgctatcgtcctcgttgacggtggcggcaccaccggccaggctggcgcaatccgcctgggcgttgcccgcgctctgaacgctatcgatcgtgatgcgaaccgcgcagccctgaagaaggctggcttcctgacccgcgacgctcgcgtcgtggaacgcaagaaggccggtctgcacaaggctcgtcgcgctccgcagttctcgaagcgctaaagctttacggcttatacgaaacccctcggaaattcgacttccgaggggtttcttggtattccagacggtattttgactggcgtttagatggttggcatctgcttcatcgcgctgatgctcaatgccggaagcgtccacaatgtcggatcatcttccgacagcccatcatcggcggattgcagattgtccgcatcgtctttcatttgccagtacatcatgttgatgcggtgcagatggttgcggagcctgcccgcgggcttgctttccgattcttcgtcgaattccgacacccgttcgatggacgttcccaatcccggatattcgccgacaatctccgatgaggaccagaccatctcccattcgatgtctttcggcagatgaaaacgcgtgacctcatcggaaccgttgatcagaatcagcagacttggctcgtcgggggatagcagctgcatggcgaacgaacggacggaaggattcgtccaatccgcatcatttggcatctgtccattcggcaaataccaatgcacgcgatcggatttcttcagcaaaccgatttcgctcaggcgagtgaagaaatcctcatgattgtacaaatcgcgggatttacgcaatgtgattaaacgggaagtgagattgaactgcttcaattccggcgtttgttcggtactgtacagccaatcccaatcaagccaggtggtgtcgttatcctgcgtgtaggcgttgttgttgccgttctgcgaattgccgaattcgtcgccggcaagcagcattggcgtgcctagcgaaagcagcagcgtacccagcaggttcatggtggcgcgttgccgttgctgcacgatgatttgatcgccgctggggccctcgtgaccgaagttgacggaatgattgtcgtttgttccgtcgcggttgttttcgccgttggtctcgttatgcttggttttgtacatggtcagatcggctgtggtgaagccgtcatggcatgccacgtaattcacggacgcggtcgaaccgcggcctggatcggtggcgaacaggtcggatgatccgcacaaacgtgtggccatctcctgcatggtcatttcgccgtattctccaccgcgcatgcgatccacgtcggtcagccagaatttgcgtgtgcaatcgcggaacctgtcgttccattcggcgaaggggatgccgaattcgccggtgcgccagccatttggaccgcaatcccaaggttccatgatcattttgagattgccgagcagcatgtcggaacgcaatgcatacaggaacggatggtagcgggtgaattcaccgtcgagacgtgccagcgtcgccgcgagatcgaatcggaatccgtcgatgccaatgcgtttggcccaatagcgcaacgaatccacggcgaatgtggtgacgtgcgtgttggtgaaatcaagcgtgttgccgcagccggtggtgtcgtacaggcggctgatcttatctttggtgcgtcgataatatgccagattgtcgagtccgcgccagcatacggtcggtccttccggaccggattcgcaggtgtggttgtagaccacgtccataatcacttcgaatccggcctcatgcaaggctcgtaccatgtcgatgacttcctggcgtactgcggccgcaccggcctcctgggagcgcttggtggcgtatgaggcttccggcgcgaaatagccgagcgtcgaatatccccaatagttgacgcgtccgcgttcctgcagaaacagttcggattgcttggcttgaatcggcagcagctcaatggaagtgacgcccaaatcctgcaggtaggagagcgtcgccggatgtgccaaacctgcataggtgccgcgaagctctttgggaagccaaggcgcgttggctgtgaagcctttgacatgcagctcgtagatcacggttttgctccatgccacatgcgggtgtgatggctcaccgtcatgcttgttggtggcacgatcgtctatcgccacggaaacgggaacatgccccacggagtcgatggtgctcatcgggccgaatggcgaacctttgactttgccgttcacgatctcgcattcataggagaacgctccgggatcaagctccattgatccttcgatgcctttggcataggggtcgagcaacagtttgtacgggttgaagctcacgccgtggtcggggtcccatgggccgttgacgcggtatccgtattgcatgccgtcccatgcttgcggcacgtgcacgtaccacagtccgtaattgggcccgtccatgcggaatagtgtttcgcgaagattgagcgaggggattcgccgagtgcagatgcgctgtttcatcgcctgatcgatgaaggtcagccccggctcgttgaacaatcgtactgcgtcggcatagaaggcactgggttggtcgagcggctcaagtacgcaaaaccacacttggtccgctgtttccgagcggacgatggcatccgccccaccatcatcggtgaagtagagacctggacgagttgcataacggtgcaaagacgggttcttcataacctcattctaaacactttgaaattatctgttgacttactatgtcgaggctgtcgacgctcgtgccggtctgatccggccgtgagcttgaactcgagcaggtgcaggacttcctcgacggcaaaatcgccgccgcttccaaggctgtcgtcaaaatcggtgctgacgctgtttattcgtcctgaacagcctggaattagcaaaaaagtgtcacgatatgacggcaaatgcgccgctgacatcgccgcatagcgcatatcctaatcacaaaagggaaaaacgtatcgtaccaaccatcacaaggagggtattatgaccaaaccaatgtctgaattcaccaccgatctgcagcattccggcatgccggcgaaagatctggacgaaaccatcgaattctataccaagaaactcggtttcgagttggcgggactgttccataacggtgaaaaccgttgcgcattcctgcgttacggccatctgaccatcgaaacctgggaaggcgacccagcgccgctgaccaccggtgccatcaaccactgggcgttcgatactcccgacattgaagccgcgttcgaaaacgcgaaggaactcggactgaatttcaaagacactgaaattcagcatatcgacagcttctgggagcacggcattcgctacttcaatgtatacggaccgaacggcgaaaccatcgaattctgccagattgtcaaataactatcattagatgattaccgtcaaataatcgctgaaaaaatacaacaagtgaagcagacggaagcgaacaaagaagcgtgcgttgaaccttatatacgggttcggcaacacgcttcttttgttatgcaagcgatgcgattaatgcgattaatatatgtgtaaaagcggtcacatatcgcatagttcgcgtacgtacggttccacaaaacgcagggccgcgccgataatgtcttgatggtcgagcgccattcccttgcgcagggtgaaatccgtggtgccgaatggcgtatgttccaccacgcgttcgcgtagtccggccatatcgtcatcatcgagatattgtgctgcctcaccgctgatgatcacgtcaccggccagtaccgagcgaatgttcgttaccgccagcgccacataatccagccattgcgagaatcgtttgcgatgctcctgctcgccttgttccaacaccgaaaagaagccgggcaggctttcgccgtcttccatcagcgtttccggcgagcaatacgtatccatgcagccctgttgcccgcagtagcaggtgttgcctcctggaatcagcgtcatatgttcgattgagccattgcattggttcggcccctggtacagcgatccgtccacgatgaccgcgcctcctgggcgacgttcaaggtagatacagacggcgtccttcagattgtggtcggaccagagttccgccatggcagaagcgtcggaatcgtgaatcatcagcgacggatggttgagaccatggctgagttcgctgagtttcaggccggtgttgcccatgattttgccgaaagtgatcgactggccgtccgccgacacgatgccttgcatgcagaaggccacgccgagtaccgtgctgccttgtttcgccagttcttgcgcgaaatcgttgatgatgccattcatgcgctggtagtaggcgtcgttgttgcgataggggagtgtgcgctgtctggtggctacggatttgccgttcagatcaatggcgatggccgtgatttgtgtggtttggatgcgcacgccgatcgccacgctggagtgtgccgcgaattcgtagatttgcgctttgcgtccaccggtggattgctgcatctcgcctttgacgatgagctcgtcggcctccatggcgcgcagattctgcgtgatggttggcaggctgagccctaattcgtgttcgaacatctgcttggtggctgaaccttgggtatagatgaacgcggtcatggccttgagattggcttctttgactgatagggcggattgggctttcactggttgatccttcctgcgcaacttctttttcaagactacttcataaaagtcctttccttatgtctcgtgttggtctgagatatcaggtattgcaaaaaagtatcaaaaatagctgtgcataaaggattttctgccacttttctgcgtcgaaaatatgtttatcaacaaaaaagttgagacggtgacaacgacgttctaccaagaaaagagacatgttatgaagataggtctgccgcgcacgctattggccggcttggtcgccatagcggtgttcatgactggcgatggctttgaattgacttttttgtccaaatacatcgtggaccagggattcagttcttcacaatcgtcgctgatattcaccatgtatgggctgatggctgcgcttgctggctgggcgtccggtgtgctagctgaaatgtttggtgccaaacgcatcatgctgatcggcgcgagcgcctgggtcgttttgcacctgctgttcgttggtgtggcgctgccgagcggcgtctatccgctgatgttaggcgtgtatgcgttgcggggtgttggctacccgctgttcatctactcgttcgtggtgttgatgacgcaaaccatcgatactgccaagctcgcgtcggccatggggtggttttgggccgcctactcgttcggcattggcgtgttcggcgcatatttgccgagtttcaccattccgctggtgggcgagtactactcgctgtggctttcgttgcctttttctatagctggactgctgatttgtctgctgatggtgccgaaaagcaagagtgctgacacctcttccatgagcaatgccgacaagctgcgcgagcttagtcgaggagtcaccattctggtgcataatcgccaaatcgcgttggctgcggtggtgcgtgtgatctgcaatctgacgttgtacggctttcccgtcatcatgccactctacttggccactaccaacaatggtggcggcgcttggtttaaggtttcgcaatggagtcagatttggggattccagtttgtggtcaccattttcggcaatgtgttctggggtcgtatgggcgattcgcatggttggatgcggcaaatgcgctggtttggctgctggttctgtgtgatcggcacgctgggcatgtattacattccgcagtttttcggggcgaatatggtgcttatgtgtgctgatgcggttgttcttggattgggaatttccgctttcgttcctatgggagccgtgtttcccgcgttggcgtcggaacataagggtgctgcgatttccgcgcataatctcgcttccggcctgactacgtttttcggtccgctgattgcgacggtgctgatttccactatcggattcggcggcgtgtgctggacgtatgcgatctgctatgcgatcggatcgttggtcacgctcggcattcatcctcatcaacccggatttgacgatcgtggccatcgcattaccgcgatcgaacgtaactaatcgcaattgaatatcaattgctcaatcatcatttttctcaaaaaacaccattattcacaaaggagaataatcatgaaggcagtcgttctcgaagagcagggcgtcatcaatgtgcgtgaggtgcctgacgtccccgcacctggtctaggcgagctgaagatcgcgccacataccgttggtgtgtgcggttccgacctgcattattacactcatggtcgcgtgggtaaatatgtggtggagcagccgatgattctcggtcatgaggcttccggcacggtggttgaggtcggtcctggcgtcgaaggcttcaaggtgggcgatcgtgtggccatggagcccggcattccggatatgagttcgcgtgccagcaaactgggcatgtataacgtcgatcctgcggtgcgtttctttgccactccgccgattgatggctgcctgtgcgaaacggtgaaccatcctgcggcgttcacctacaagctgcccgacaatgtgagcttcggtgagggtgcgctgcttgaaccgttggctgtgggcatgtggtccgccaccaaggctcgtatcaagttgggcgatgtctgcgtggtcaccggatcaggcacggtcggcatgctgaccgcgtcgtgcgcgttggcgggtggcgcttccaaggtgctgatctctgatgtgtcggcaatcaaactggcgattgcggctcagattccaggtattattccggtggatctcaccaaggaggatctggtggagcgcgtccgcgaggaaacggggggctggggtgctgatgtggctttcgagtgctcgggctcgccgaagtcatacgagacattctggaagctgattgctcccggtggcgctgccgttatcgttggcattccggtcaatccggtggccatcgacattacggaactgcaggctaccgaggtgcgcatcgaaaatatcttccgttatgccaatgtgtatcagaaggccattgacctcgtggctaacggtaaactgaatctgaagccattcatcaccgacacctatgcgatggaggatgcccaggcggcgttcgatcgcatggccgaggggcgtcctggagacattaagctgcagattaccgtgaaaaacgactgacgttacgcacgttacggaacgacgaaaggggtctatgccatgggcgctgttgcacaagtcaacgataatcggcatgggaaggcggctttggctcagacctcttttggtggattcgtgccgaaaggtggaagttcgaacgattccggcgtattggagatcattgtgccggacgcgcaggcttcggtgcgttgggcgaagcatggctacccaagctcgttggcgaaatggcatcatcatcctcatattgaaattcatctgattcgggaaggtaccggattgatgatggcgggcaatgccgttgttccgtatgaggccgggcaggttgcgctgattggttcaaatcttccgcataattgggtgtccgacatcgctccgggggagcggcttcgtcagcgtgatgtggtgtgccatgtgcgtccggaaaccatgcgtctgctgatgtctggatttccggaaacgtctggttttgcaatggtgttgaaacgtgcggggcaggcattggtgctgagcggtgaatccgctcgtcaggccggttcgattctggaaaacatggaggaacatagtcttgcttgccgtgttagtgatctgattcgtgtgttggatgtgttcgcgcatgcccccgcagatgaatcctatacggtggttgcgtccggatacgatccggctgtatgcagtggtgcggaacgtgtggtcaatgatgccatcgagtacatttcatcgcatctgagcggtgaaattagcatggatttggccgcccgccaggccggaatgagcgtttcggctttctctcgtctgttcaaaagggctgcaggaatagggttttcggattttgttcgacgattgcgtatcgggcatgcatgcagattgctgacgaccacgaatcaaagcgtcgcttcgatccgtcgcgcttgcggatatggtaacgcttcgaatttcaatcgtcgcttctttgaagaaacaggcgaaactcctactggctggcggaaaaaatacattggacgaacaagataaataaatcgactttgtaaaagctcgatatgattgatatcatatagaaaatacttttataaaagatatggaggtgagacttgagaaagtgtgtgtgatttatgataaaaagcaacaaaaacgctcaaaatgatgtttttgaggctttttgattccataaaagaacgcaatctaaacattaaatgaacagaagataacatttctcttgcgacacgacacagtggaacatcatattgcatactcactaaagtgtgtcctaggtcacaaaagaccagcaacgcgtccatccgcttcgaggcggatggaataacgggaaactactttgcaaacccccaaagaatcgaggaggacttcaagtggcagacgcaaagaaggaagagccgaccaagccgactccggaagagaagctcgccgcagctgaggctgaggtcgatgctctggtcaagaagggcctgaaggctcttgacgatttcgaaaagctcgatcagaagcaggttgaccgtatcgtcgccaaggcttccgtcgcagcactgaacaagcatctggtgctcgccaagatggccgttgaggaaaccggccgtggtttggtggaagacaaggccaccaagaacatcttcgcctgcgagcacgtcaccaactatctggccggtcagaagaccgtcggcatcattcgtgaagacgatgtcatgggcatcgacgagatcgccgaaccggtcggtgtcgtcgccggcgtgaccccggtcaccaacccaacctccaccgccatcttcaagtcgctgatcgcgctgaagacccgctgcccgatcatcttcggcttccacccgggcgcacagaagtgctccgtcgaagccgccaagatcgtgcgcgacgcagccatcgcggcaggcgctcctgagaactgtatccagtggatcgagcacccgtccatcgaagccaccggcgccctgatgaagcatgatggtatcgccaccatcctcgccaccggtggcccgggcatggtcaaggcggcatattcctccggcaagccggccctcggcgtcggcgctggcaacgctccggcatatgtcgacaagaacgtcgacatcgtgcgcgccgccaacgatctggtgctctccaagcacttcgattacggcatgatctgcgccaccgagcaggccatcatcgccgacaaggaagtctacgctccgctgatcaaggaactcaagcgccgcaaggcctacttcgtgaacgacgaagagaaggccaagctcgagcagtacatgttcggctgcaccgcatattccggccagaccccgaagctcaactctgtggtgccaggcaagtccccgcagtacatcgccaaggccgcaggttttgagattccggaagacgccaccattcttgccgccgagtgcaaggaggtcggcgagaacgagccgttgaccatggagaagctcgctccggtccaggccgtactgaagtccgacaacaaggaacaggccttcgaaatgtgcgaagccatgctcaagcatggtgcaggccacaccgcagccatccacaccaacgatcaggctctggtccgcgaatacggccagcgcatgcacgcatgccgcatcatctggaactctccgagctccctcggcggcgtgggcgacatctacaacgccatcgcaccgtcgctgaccctcggctgcggctcctacggcggcaactccgtgtctggcaacgttcaggcagttaaccttctcaacatcaagcgcatcgctcggaggaacaacaacatgcagtggttcaagattccggccaagacttacttcgagccgaacgccatcaagtacctgcgcgacatgtacggcatcgagagggccgtcatcgtgtgcgataaggtcatggagcagctcggtgtggtcgacaagatcatcgaccagctccgcgcacgttccaaccgtgtgaccttccgcatcatcgactacgtcgagccggagccgagcgtcgaaaccgtcgagcgcggtgccaccatgatgcgtgaggagttcgagccggacaccatcatcgccgtcggcggtggttccccgatggacgcctccaagatcatgtggctgctgtacgagcacccggaaatctccttctccgacgtgcgtgagaagttcttcgatatccgtaagcgcgccttcaagatcccgccgctgggcaagaaggccaagctcgtgtgcatcccgacctcttccggcaccggttccgaagtcacgccgttcgctgtgatcaccgatcacaagaccggctacaagtacccgatcaccgattacgcgctgaccccgtccgtcgccatcgtcgatccggtgctggcgcgtacccagccgcgcaagctcgcatccgatgctggcttcgacgccctgacccactccttcgaggcttacgtctccgtctatgccaacgatttcaccgatggcatggcgttgcacgcggccaagttgatttgggacaacctcgccgagtccgtcaacggcgagccgggtgaagacaagatcaaggcccaggagaagatgcacaacgccgccaccatggccggcatggcattcggctccgcattcctcggcatgtgccacggcatggcccacaccatcggtgctctgtgccacgttgcccatggtcgtaccaactccatcctgctgccgtacgtcatccgctacaacggctccattccggaggaaccgaccagctggccgaagtacaacaagtacatcgctccggaacgttaccaggagatcgccaagaaccttggcgtgaacccgggcaagactccggaagagggcgttgagaacctggccaaggccgtcgaggactaccgtgacaacaagctcggcatgaacaagagcttccaggagtgcggtgtggacgaggactacttctggtccatcctcgatcagatcggcatgcgtgcctatgaggatcagtgcgctccggcaaatccgcgtatcccgcagatcgaggatatgaaggacatcgccatcgccgcatactacggcgtcagccaggccgaaggacacaagctgcgcgtccagcgtcagggcgaggccgccacggaagaagcttccgagcgtgcatgagtcgcttcatgtataggccatcagcagtgacctatatataaggtgcttgcgttatatcggcaagcatcatagataacgaggaatttggttggattcgttcaaccaaattcctcgttatctatatgtggaaaagcattttcggatgatgctgcagtatgatcgcaacagacgatcggcaatgtgcatctcattcgttttcagggacttgaaaacaggacttgaggccgcgacacgcgaggatttcttaagactacccctgatgcttaaataaagaagttgcctgattttagggctcgcaaattggaattaaaaaagcgagcgtggcacagtgatcacgagagtgaaaactgcatggctgcgcactgatgtggtatgaccacggaacttccacggtttcgggggtcttctgcgccggtgccctttgagaagcaggctggtaaacagtaactaacgaatcgctagaaagggcggaaggcaatggcgggacagaaaatccgcatcaggcttaagtcctatgaccatgaggtcatcgaccaatcggcgaagaagatcgtcgaaacggtgacgaacgcgggcgcaactgtggttggcccggttccgctcccgaccgagaagaacgtgttcgtcgttatccgttctcctcacaagtacaaggattctcgcgagcatttcgagatgcgtactcataagcgtctcatcgacattgtggacccgaccccgaaggccgtggattcccttatgcacattgatctgcccgcagatgtgaacatcgagatcaagctgtaagggaggagggaaccattatgtctaatcgcaccgcactgctgggcaagaagctcggcatgtctcaggtctgggacgagaacggtttcttcgttcctgtgaccctcgttgacgtctccaccaacgtggtgactgctgtcaagtccgaagagtccgacggctacaaggctgttcagcttggctacggccaggttgacccgaccaaggtgactaagccgcttgccggccacttcgccaaggctggcgtcaccccgcgtcgtcacctcgctgaggtccgcaccgataacgccgaagagttcgagccgggtcaggagctgaccgctgagctgttcccggagggcaccctggtcgatgtgaccggtaccaccaagggcaagggcttcgcaggcaccatcaagcgctggggcttcaagtcctatcgtcgtacccacggctctcacaagaacgagcgtcgtcctggctctgttggcgcatgcgctaccccgagccgtatcctcaagggcaagcgtatggctggccgcatgggtcatgtaaccaacaccacgctgaacctcaccatcgtttcgtcggatgttgagaacggcgtgctcgccatcaagggcgccatcccgggcccgaagggcagcatcgttctcgtccgttcggcagtgaagggagcctgataaatcatggcaaacgttactctgaacgttaccgataaccagggcaatgcaaccggaaccgttgaggctccggctgagatcttcggcttctccgccgaagaagtccagtcccgtatcccgctgatccaccaggttgtggtggcccagcgcgccgctgctcgtcagggcactcatgccaccaagactcgcggcatggtttccggcggtggccgcaagccgtggaagcagaagggcaccggtcgtgctcgtcagggctccattcgtgcaccgcagtggtaccacggtggcaccgtgttcggtccgcagccgcgtgactactcccagcgcaccccgaagaagatgaaggccgctgctctcaagtacgtgctttccgatcgcgccaacgcaggtcgcgtggcagtcgtggacttcggcgtttccgaagccccgtccaccaaggccgctgttgccgctcttaccccggtgaccgagaacaagttcaccaccgtggtgctctctcgcgagaatgtgaacgaatggctttccgttcgtaacatcccgaccgttcacccgatcttcgccgatcagctcaacacgtacgatgtggtcaccgctcagtacgtggtcttctccaaggaaggcttcgacgctttccttgctgcgaaggctgagccggctgcaaaggaggcctgattttcatggtcgctattcacaagcccgcacacgacatcatcctcaagcctgtcgtttctgagaagagctacgctctgtccgatcgcggtcagtacaccttcgtggtggccccgaacgcgaacaaggtccagatcaagcaggcaatcgaagagatcttcaatgtcaaagtgacgaacgtcaacaccctcaaccgcgccggcaagcgtcagcgcacccgcaacggtttcggccagcgcgtcaatcagaagcgcgctatcgtgaccgtcgccgagggccagacgatcgacatcttcggtaactgaaggctagccgagaaaagttaaaggaagaactagattatggctatccgcgtttataagccgacgactgcaggccgccgtaacgcgtccgtctcggacttctccgagcttacgcgttctacgcctgagaagtcgctggttcgcaaactcagcaagactggcggtcgtaactcttacggccgtatgacctcccgtcatcgtggcggcggtcacaagcgccagtaccgtctcatcgacttcaagcgttgggacaaggacggcgtgccggcaacggtcgctcacatcgagtacgacccgaaccgttccgcccgcatcgcactgctgcactacgcagacggtgagaagcgctacatcatcgctccggaaggtatcaagcagggtgacgtcatcgagaccggcgcccaggctgatatcaagccgggcaacaacctgccgctgcgcaacatcccgactggtaccgtggtgcacgcaatcgagctccgcccgctgggtggcgccaagatcgcccgctccgctggtgcagccgtgcagctcgtcgctaaggatggcgcttacgcccagctgcgtatgccgtccggagaaatccgcaacgtggatgctcgctgccgcgcaaccgtcggtgaggtcggcaactccgatcacgccaacatccagctcggtaaggcaggtcgtgcacgttggatgggcaagcgcccgatcacccgtggtgaatccatgaaccctgtcgatcacccgcacggcggtcgtacccgcggtggcaagccgccggtttctccgtggggcaagggcgaggttcgtacccgccgtccgaagaaggcttcgaacaagatgattgttcgtcgtcgcccgaatggtaagaaccgtaagtaagggagtgtcgagtagatgactcgtagcatcaagaagggccccttcgtcgacgcccacctgcagaagaaagtcgacgagcagaacgagaagggtacgcacaacgtcatcaagacgtggtcccgtcgttcgatgatcacccctgatttcatcggacacaccttcgccgttcacgatggtcgcaagcatgttccggtgttcgtcaccgaatccatggttggccacaagctcggtgagttcgccccgaccaagaccttcaagggtcatgtgaaggacgacaagaaggcacgccgctaaaggagagtaaggacacatggaagctaaagcaatcgctcgtcacgtccgcgtgacgccgcgcaaggctcgccgtatggtcgacctcatccgaggcaagaaggcgaccgaagccatcaccattctgaagttcgctccgcaggacgcatcccttccggtgcgtaaggtcctggagagcgccatcgcgaacgctcgcgtgaaggccgacaaggccggcgagccgttccgtgagaacgacctggtcgtgaaggagacctatgtggacgaaggcgtgacgctcaagcgtttccgcgctcgtgcacagggccgtgccgctcgtatcaacaagcgcaccagccacatcacggtcgtcgtcgctaacaaggaaggaaaccgctaaagatgggtcagaagatcaatccgtttggctaccgcctgggaatcactgagaaccatcgttccaagtggttctccgattccaacaaggttggcgaacgctaccgcgacttcgttctcgaagatgacgccatccgcaaggccatgagcaaggatcttgagcgtgcgggcgtgtcccgtatcgtcatcgagcgtacccgcgaccgcgtgcgtgtggatatccacaccgctcgcccgggcatcgtcatcggccgccgtggcgccgaagctgagcgcgttcgcgccaagctcgagaagctcaccggcaagcaggtccagctcaacatcttcgaagtgaagaacgcagcactggacgcccagctcgtcgcacagggcatcgctgagcagctgaccaaccgcgtgaccttccgtcgcgcgatgcgtaaggcccagcaggatgccatgcgtgcaggcgccaagggtatccgtatcaagctctccggccgccttggtggcgccgaaatgagccgttccgagttctatcgcgagggtcgcgttccgctgcagaccctgcgtgccctcatcgattacggcttcttcgaggccaagaccacttacggccgcatcggcgtgaaggtctggatctacaagggcgatatgaccgagcgtgagttcgaagagcagcaggcacagcagggcaacaaccgccagggacgtcgcggcgatcgccgtccgcgccgtggtcagcgtaacgctgcccagcagcagaacgcagcagcagaggctccggccgcagctgaggcacctgccgcaacggaaacgaaggagtgagctgagaaatgcttatcccaaagagaaccaagtatcgtaagcagcaccgtccggtccgccgtggtatgtccaagggcggcaacgagatcgcattcggcgatttcggtattcaggctcttgctccagcttatgtgaccaaccgtcagatcgaggccgctcgtatcgccatgacccgctacatcaagcgtggtggccgcgtgtggatcacgatcttcccggatcgtccgctgaccaagaagccgctcggcacccgaatgggttccggtaagggtactccggaattctggatcgctaacgtccacccgggtcgcgtcatgttcgagatcggtggcgtgtccgaggatgtcgctcgcgaggctctgcgccgcgcaatcgacaagctccctatgaagtgccgtgttattgctcgtgaaggcggtgacatctgatggcagtcggaactgcagactacaccatgaagaatctgaacgagaagaccaacgaggagatcgagggcttcctcaagaagtccaaggaagagctgttcaacctgcgcttccagtccgcgaccggtcagctcgaaaataccgcccgcctcaaggcggtcaagcacgacatcgccaggatgtacaccgtcctgcgcgagcgtgagctcggcatcagccaggcccccgaggcgaccgaaacgaaagctgaggagaagtaatggctgaagagcgtaacttccgcaaggttcgtcgcggttacgtcgtgtccgataagatggacaagacgatttccgtcgagctcgagcagcgttcgacccacccgctgtacggcaaggtcgtgcgttccactcgtacggtcaaggtccatgatgaacacaacgaggctcacattggcgacctcgtgagtattatggagactcggcccctgagcaagaccaagcgttggcgtctcgataccatcatcgagcgcgctaagtaaataagttcggcaaggctccgtgagtcaccccgcctgcttcaagcaggcaggcggggtgcttggggagaaccagctcggctaaggagaatcaatgattcagcaggaaacgcggcttcatgtcgccgacaacacgggtgcgaaggaactcctcgccatccgagtgctcggcggatcgaagcgacgctatgccggcatcggcgacgtgatcgtcgcctccgtcaaggacgccatccctggcgggtcggtcaagaagggcgacgtcgtcaaggctgtcgtcgtccgcactgtcaaggagcaccgtcgtgtggacggctcctacatcaagttcgacgagaacgccgccgtcattctcggctctggccgtgaaccgaagggcactcgtatcttcggaccggtcggtcgtgaactgcgcgacaagcgcttcatgaagatcgtgtccctcgccccggaggtgatctgacatggcagccaagattaagagcggcgacctggtcaaggtcattcgcggcaaggatcgcggcaaggaaggcaccgtcaagcaggtgctcaaggacgatcgtctgatcgttgaaggcgtgcagatcgtcaagaagcacgttcgcgctacgcagcagggccagcaggccggcatcgtggctgtcgaggctccgatccatcgctccaacgtgatggtcatcgatccggagaccaagcagccgacccgcgtgcgcatcgtcgaaaaggaagaggctcgcgacggcaaggtgaagaccgtgcgtgtgcgtgttgccaagaagtccggaaaggagctggcatgaccgataccactgtcgaagcgccggcaactccgcgcttgaagcagaagtacaacgagcagatcgtgccggagctggagaaggaattccactactccaacccgatgcaggtcgctcgcgtccagaaggtcgtcgtctccatgggcgttggcgccgctgctcgcgactccaagcttatcgaaggcgcagtcaaggacctcaccctgatcaccggccagaagccgaagatcaccaaggctaagaagtccgttgcacagttccacctgcgcgaaggacaggccatcggcgcttacgtcaccctgcgtggcgagcgtatgtgggagttcctggatcgccttctgaccatggctctgccgcgtatccgcgatttccgtggcatcaacggcaaccagttcgacggtcagggcaactacaactttggcctcactgagcagtccatgttccacgagatcgatccggattcgatcgatcaccagcgcggtatggacatcaccgtggtgaccagcaccaaggacgacaaggaagctcgcgtgctcctgaagcacctcggcttccccttcaaggagaactgatatggcaaaaaccgctcttaagaacaaggcggccgctaagccgaagttcaaggtgcgcgcttatacgcgttgccaggtctgcggtcgtcctcactccgtctaccgcaagttcggcctttgccgcatctgccttcgtgagaaggcccaccgcggcgagctgcccggcgttacgaagtccagttggtaaataacgacgctgaaggtccgcggcccaatcgttcaatggagcgtgcgggcggcggaaaccacggcgagaaagggcaataagcccaaatgacaatgacagatccgatcgcagacatgcttacgcgtctgcgtaatgcgagcgcggcaaagcacgagaccgtggatatgccgtactccaagttcaaggcgaacatcgccgagatcctgaagcgtgaaggctacatcaaggacttcaccgccaaggaagccaaggtcggccagactctcgaggtcaccctcaagtacggtccgaacggcgagcgttccatccagggcatcaagcgcatctccaagccgggcctgcgtcgctacgcaaagtccgatgctctgccgatgccgctcggtggccttggcatcgcaatcatctcgactagctcgggactgctgacccagaaggaatgcctcgatcgaggcatcggcggcgaaatcgtcgctttcgtttggtgagaaaggagagctgaaacatggcatcgcatattggtaagctccccgtcaccattcctgctggcgtggaagtcaagatcgacggtcagtccttcaccgccaagggcgccaagggcactgactcctacgagattccggaaggcatcaccgctcaggtcgaaggcaacgagatcatcctcgttccggctgacgatctgcgtccgacccgtgcaaagcacggcctggctcgttccatcgtggcgagcatggtcaagggcgtgcacgagggttacgccaagactctggacatcatcggcaccggttaccgtgctcaggcgaagggcaagggtatcgagttctccctcggttactcccacaccattaccgttgagccgccggaaggtatcgagttcgaactgccgaatccgaaccaggtgatcgtcaagggtatcgacaagcaggctgtcggccagtgcgccgctaacatccgcaagcttcgcgctccggaaccctacaagggcaagggcatcaagtactcggatgaacgcatcctgcgcaaggctggaaaggctggtaagtaatgagcgtccagattttcggtaagggcaagaaggtcgcgcttcagcgccgtcacgctcgtctgcgcaagcgcatcagcggtaccccggagctcccgcgtctggtggttacccgttccaaccgtcacatggttgcccagatcatcgatgacaccaagggcattaccttggtgagcgaatccactctgatgagcgatttcgcaggtttcgaaggcaccaagaccgaagctgccaagaaggtcggcgaactgattgccaagaaggctcaggatgcaggcatcaccgcggttgtgttcgatcgtggcggcaacaagtatcatggccgcgtcgcagctgtcgctgaaggcgcccgcgagggaggtctggcactgtgagcgacaacgaaaaggaaacccaagtggctgaagaaactcagaacactcaggctgctgctgaagctaccaacgaggatcgcaagtcccgtcgtggccagcgtggtgagggtcgtcgtggcgagcgtcgcaaccgtcgtgaggaatctcacgagaacgagatgctcgatcgcgtggtgaccatcaaccgtgtgtccaagacccacaagggtggtcgtacgttcagcttcgctgccctcgtggtggttggcgacggcaacggcaccgtgggtgtcggctacggcaagtcccgtgaggtcccggctgcaatcgctaagggtcagctggatgccaagaagcacatgttcaccgttccgcgcatcaagggcaccgtcactcacccggtgatcggccatgatgctgctggcaccgtgctcctgcgtccggctgctccgggtaccggcgttatcgccggcggtgcggtccgcgccgtcatggaatgcgctggcatcaccgacgtcctgaccaagtcgatgggctccgccaccgccgttaacgtggtgcgcgcaaccgtcgacgctctcaagaagctcgaagagccggaagagatcgcagcccgtcgtggcatgtccctcgaagaggtggctcctgactccctgctgcgtgctcgcgccgaaggcatcgccgaggctcgtaaggcccgtgaagaagcacaggccaaggccgctcagaaggacggtgagtgatgactaacctgaacatcaagctgcaccacggtctggtgaactccactccgaagcagcgtgctgcggctcagactctgggcctgaacaagattggcaagaccgtgacccgtgaagacacgccggccctccgtggccagctgctggtcctccgtcacctggtcaccgttgaggaggctgactgattatggcagatattctgcagatgcatgacctgaagccggctccgggcgccaagaaggatcgcactcgcgtcggccgtggtgaaggctccaagggtaagacctcgggccgtggcgacaagggcaccaagaagcgttaccaggttcgtccgggcttcgaaggtggccagctgccgctgtacatgcgccttccgaagctgcgtggcttcaagagcccgttcaagaaggaatatcaggtcgtcaacgttgctgctctcgcggaactgttcccgcagggtggcgaaatcaccgttgccgatctggtcgccaagggtgccgtgcgtgacggctacccggtcaaggtcctgggcgacggcgaggtttcggcagcctacaccatcaagggtgttaaggcttccgcttccgccaagtccaagatcgaggctgccggcggctccatctccgaggactgattccaaggaatgtagagctgactgaagcttgcaagtgaggcttctcccgcttagacgggggaggcctcacttcgttttggtccagtacggggaacaaaacgaaaacaatgcctcgaaatcttgtaaaaaaccgacaaaggatggaacactccacgtgtaggtagacgccgtacgctagactcgatcggtagagtctgttttgcatgggtgcgcaggcgcgcacgtcgatggaaggaatcccaggtgaggacgttaatccaggccttgaaaaccaaggagttgaggaacaagatcctcttcactcttggtatcatcatcatttatcgtattggttcgttcattccgaccccaggcgtcgactataaggtcgttcagcagtgcctcggttcgatggatagcacctccgaaaacttcattggtctggtgaacctcttctccggcggcgcaatgttgcagctatcgatcttcgcactgggcgttatgccgtacatcacggcatccatcgtcatccagctgctgcgtgtggtgattccccgcttcgaggcgctgcacaaggaaggccagtccggcgaagccaaactgacccagtacacccgttacctgaccatcggcctcgcagtgctgcagtccaccaccattctggtgaccgcccgctccggcgccctgttcaactaccggtgctcccaggttgtgcctgacggttccgtctggaacctcgtggtcatggtgctcatcatgactggcggcaccggcctcatcatgtggatggccgaattgatcaccgataagggtcttggtcagggtatgtccatccttatcttcatgtccatctgctccggcttcctgccgcagctttgggagatcggttggggcaccaaaggcaccgatggcaattgggcgaagtttgccgcggtcgtcggtgtgctgctggtcatcatgatcctcgtcatctacgtcgagctttcccagcgtcgtattccggtgcagtacacccgtcgtatgattggccgtaagatgtacggcggatcctccacctacctgccgctgaagatcaatatgagcggcgttattccaccgatcttcgcgtcctccattctggccatcccgaccctgatcgcacagttcggcaaatccgaccagtcctgggtcaagtggatcaactccaacttggccaacaccacttccgtgtggtacatcgcactgtacgcgttgatgatcgtgttcttctgcttcttctacacggaaatcaccttcaacccggacgaaaccgcggacaacatgaagcagtacggcggcttcattcctggaatccgcgcaggcagcgccaccagccgttatctgagctacgtgatgaacaggctcaacaccgtcggtgccgtgtacctactattcgtggcgcttattccgaccgtgcttatcatggcgcttgacctcaacaccaagttgccgttcggcggcaccaccatcctgatcatcgcaggcgtcggccttgacaccctgcgtcaggccaaggcccagaccgaacagttccagtacgctggattcctgttcgagggtactgaccacaaggaaggcaagtaaaacctcaaaatcgtgataccgtttcgacgtgaagcggtatcacgattttcatgtaaccaatcgagaatcagaaagcctcgcaagaggctcaatgaaacggagaataacatgcgactgctgattatgggaccgcagggcgtcggcaagggcacccaggctgcgctgctgagcgagcactacggtattccggcaatctccaccggcgatatcttccgctacaacatcaagaacaagaccgagctcggtgttgaggcactgaagtacatcgacaagggcgaactggttccggacgagctgaccaacaagatcgtcaaggatcgtctggccatggatgatgccaagaacggttggatcctcgacggctatccgcgcaacgcatcccaggttgaggcactggacgccatcctcgccgatctgaacactcctctggacgctgtggtggctctcgacgctgaccatgacgtgcttatggagcgcatgaagaagcgtgccgagatcgaaggccgttccgacgacactccggaagccatcgccaagcgtcttgatgtgtatgccaaggaaaccgctccgttgctggccacctatgaagagcgcgggctgctgaagaccttcaacggcgtcggttccgttgaagagatccaatccaccatcgtggctgaactcggctgaaatagctgaagattgggctgctttgaggcatatgtatagataagaaagcccaataaaataccacaaatcaatcgaaaacgggaattgcgacacgccgaacgtgccgtagttcccgttttcgtgtattcttgcaagttggtgtgtcttcgggcacgcatagtaatcgccaaagaacggaacgaggctcatggctaaagacggtgtgattgaagtcgaaggacaggtagtggaagcactgccgaacgcgatgttccgcgttgaactcgagaacaagcatatcgtgctcgcaaccatctcgggcaagatgaggaagaactatattcgcattctgccgcaggatcgtgttgtgctggaaatgagcccttatgatctgaaccgcggccgtattacgtaccgttacaagtaaggtacacaagcaaaggaaaaccatgaaggtcagccctagtgtgaagaggatctgcgagaactgccgcgtgatccgtcgtcacggccgcgtcatggtgatctgcgtcaacccgcgccacaagcagcgtcagggctgagagcagatccagcggcataataagtacaggcgctgagtcacagatcgcgcaagcggtatgaaccccgggtacgcaggcccgggccgggaaaccggacgactcggtgcaagacctgcggaaaacagaaggaatcgcaatggcacgtcttgccggagtcgacatccccaatgagaagcgcatcgagatcgccctcacctacatctttggtgtgggtcgcactcgtgccaaggaaacgcttgccgcgaccggtatcaacccggacattcgcgtcaaggatctgacggatgagcagctgatcacgctgcgtgactacctcgagggtaactacaagatcgagggcgatctgcgtcgtgaaatcgatgcggatatccgtcgtaagattcagatcaactgctaccaaggccagcgtcaccgtaagggacttcctgtgcgcggtcagcgcaccaagaccaatgctcgtacccgcaagggcccgaagcgcacggtcgccggaaagaagaaggccaccaagtaataggtggctgtcagttcagaccacgagacgtaagtttcatcgcctgaacaacaaagcaaattcgttattaggaaacgagggtcaatggcagctcaaaagcaagccgcgcgcaagccgcgtcgccgcgaccgcaagtcggtcccggttgggcaggcgcacatcaagtccactttcaacaacactattatttcgatcaccgacccgtccggcgcagttgtgtcctgggcgtccggtggcgatgtcggtttcaagggctcccgtaagtccacgccgtacgccgctggtatggccgctgaatccgcagcccgcaaggctatggagcacggtctgaagaaggtcgacgtgttcgtgaagggcccgggttccggtcgtgaaaccgctatccgttccttgcagtccgccggactcgaagtcggttccatcaccgacgtcaccccgcaggcacacaacggcgttcgtcctccgaagcgccgtcgcgtctgagcactagaagaaatcatcaatccaacgccgcttatggccggtgagtgcaccaccggcctgaagctgaaaggataaccacagtgcttatcgcacagcgtccgacacttaccgaggaatctctcaaccctcagcgttcccgctttaccatcgagcctctcgagcctggtttcggctacacgcttggcaactcgctgcgccgtaccctcctgagctccatccctggagcggctgtgacttcggtgcgtatctccggcgtcccgcatgagttcaccactctgccgggtgttgaagaggacgttactgagatcctgttgaacatcaagggcatcgtgctcaccagcgaatacgatgagccggttgtcatgtatctgcgcaagagcggcaagggcgaggccaccgcgggtgatatcactccgccggccggcgtcactatcgccaacccggatatgcatatcgcaactctcgctgaagatggcgaactcgagatcgagttcaccgtcgagcgtggccgcggttatgtgccagcccagatgaacaagcaggataacgccgagatcggccgtatcccggtcgactcgatttactccccggtgctcaaggtgagctatcgcgtggaagccactcgcgttgaacagcgcactgacttcgacaagctcatcctggacgtggagaccaagccggcaatctccccgcgtgatgctgtcgcatccgcaggctccaccttggtggaactcttcggcctgtgccgcgagctcaacacccaggctgagggcgtcgaggttggacctgccccggtggcagaggaaaccaacccggagatggccgttccgatcgaggatctcaacctcacccagcgcagctacaactgcctgaagcgcgagggcatccacacgatcggcgagctggtcgcccacaccgagcaggatctgctcgacatccgcaatttcggtatgaagtccattgacgaagtcaaggaaaagctccagtccttgggtctggccctcaaggcttccccgctgggcaacttcgataccaacaacctcgaaggcggcactttcttctcgccggaagacgagtgattcgccgcttttgacctaaccgcttcgtcggattcggatgttcgggcaactgcccacctgagtccgacggggctttcaaggagaaacaatgcctacaccaaagaagggtccgcgtctggcctccagcccggctcatgagcgtcttatgctcgcgaacatggctaccagcctgttccagcgtggccgcatcaccaccaccctgccgaaggccaagcgccttcgtccgctggctgagcgtctgatcacgctcgccaagcgtggtgatctgcacagccgtcgtcgcgtgatgcgtgtcatccgcaacaagtccgtcgtgcacaagctgttcaccgagattgccgagcagatggagcagcgtgagggtggctacacccgcatcgtcaagattgctccgcgtcgtggcgatgccgctccggcagccatcatcgagctcgtcaccgagccggtgagcccgaagcaggccgtggtcaaggaagccgaagccgcaaccaaggttgccgctgaagaagctccggttgtcgaagaggcaccggctgaggctcaggaagccaccgcagagaacgccgagtgattggcatcaagcaggcttgactagctgatgaaaaggctgggaatcgaaaggttcccagcctttttgttatgcgttgtcatatgttgttatgcgccttttgttatgctcattgccgtgagattacgtatcgacttggcatatgacggcaccgatttctacggatgggcgaaacagcctgacatgcgtaccgtgcagggagaaatcgaacgagtgctgcataccgttcttcgtgtaccggaaggcgatgatgacgagccgctgcgcctgaccgtcgcgggtcgtaccgataccggcgtgcatgcgtcgcaccaagtttgccatctcgacatcaatgaggagacgcttgcacgttgcgtcgggcatatgcaggtcgaaccggtgatggcgttgaagcgacggctgcaacgcatgctgccgaatgacatcgccattcgttccatcgaggaagctcccgaaggattcgacgcacgtttttccgcactggaacgcacttacgtatatcgcattgccgaccgatcaagcgaaatcgatccacgtatccgcaattgcgtgctgcatatcgacgatgatctcaacatcgaagctatgaacaaggcagctgaaatgactatcggcctgcatgatttcggctcgttcgcaaccccgaatcctggaggcaccaccatacgcgaggtcaaaaccgcgtattggcgtcgtataccgcagcatccgctgatcgacgacggaaatacgatgggggagcgatatcgcacgcctgcggtcgaatccggactgctgtgcttcatcatcgttgcggacgctttcgcacgcaatatggtgcgatcgctggttaatggttgtgtgcaggtaggcatcggcaaacgttccgtggattggttcgccgaaaaaatgacgacgccgttgcgtgaaggcagcactggtccgatcgctccgcaaggattgacgctggaacatatcgaatatccggaagacgaccagttggcgattcgtgccgaagcgattcgtgcgaaacgtactttgtaagagcacatactgtacggatacacagaagattgcgctatacaatcgcaccaaatatcgcatcacaaaaccacatcacgcaatcgcaaaaacgcaaaaacgggatataaccgcgattacccccgtttgctgcgtaagtccatggatttcgtttccacggaaggcattgccgtcgtactgacgccggggcgatacaattccgcgtttttcgaacatgcgtatctggcggaaaagacgggtgccgcgctggcgttcccagaagatctcgaagtcgttgacaacaaggtgtatttccttaattattccggtaaacgccatcgtgtgggcgtggtctaccgccgcctgtcggacgaatatcttgatccgttcgcgttcaatccggattccgtgatcggtgtgtcgccatgttggattgaccgcgcattatatcgccggattgttgggcggtgagggcgccacgcatgcctgggtggaggtgtaccacaacgagcgttggatcggtcttgatccgacgcacaaccgtatggtcgacgacaactacatcacgatcgcgcatggtcgtgattaccgcgattgcatgctcgatatcggcattttctccggctgcaatgtgcagcagcaccagtgggtgaatgcttccgtgcgcgagcaggagttgtaaataaaaaaaccgaagcgccgttgctccggtttttctacttgcggataaggcgagattcgaactcgcggaggggttcgccctcacacgctttcgaggcgtgctccttagaccgctcggacacttatccattgtgctacttgaaaacaagcaacttcatcattttgccacagctttggcgattgtcaaatccgattgagggatttttgcgatgtctgcgattgctcggcgtgtcttattcgcgggaacactgcgtcgcattgtgtgaagacggttgcgcggacagcgtacgcaagtctgcgctatgcgaatagcgcttcgtcgaatgccggataaccccagtcgagtgccagatccacgcggtcggcgatcatgctggcgatcatgcccagtgactgttcccgggagtcatccgaatggtcgtccgaggttgtttgggacttcgtcgaggcgttcgacgaagtcgagcttgccgcaacggctgcgatttcgctgcgcgcgcaattcatttccaggacggcatcagttggcgcgtacaagcccgttgcggaatccacgatggtattaggattggcgagcagctgcgtgacatcataggttttcgcacgattgtcttcggctccggaaagagaaatcaggcgttgcgaagtggttttatgacgatcgctgatgccaagcgtcgcatgaccgaaggaacgcgcggcgaacacctccatcgcgaaccccacctgatcttccgcagcagccatggctgcaagcgaatccgtatcgacatcaagcgagtcaatgccatcgcatcgtgacagcgtgggctgtgcgatgtcaatcgcaagccgtgaggccatcaatctgacggcgtgacgggcctgcgcgctgcgcaacgtgccatcggcgaatcgcgccgggcaatatgccgcggtgttggcccaatctgaaaccgcctcctgcgcggcaagatagcgcatgacgatatggcgtgacctgtctgccatgatgtcggcgttggcagtcgcgtctgcatacgccctttcgcaaggacttggctgctgttcggcttcggcgcgacctgcgattcgaggagcggaacacgcggccagtgatgccacaagggcgctcgcgcacaccaagacgcaggcgcgtctgacagtcgacaaggccaaggggaaaaacggggagcgtgtctgcatgaaacattagactaatagtcgactgtgaccattgggccgagcgctcggaataacttcatataggaggtcttggaagtatggaactggacctggcaggaatgcaccagctcgcagctgggcagggaatcgatcccgagacgctggatgccgcactctcggaagcattgcgactggcatatctgaaaacgccgcacgcggcgaagcatgctcgtgtggagcttgatccgcgtgccggaagctttaccgtttgggctcaggatgagatccccgtcgagccgaccgaggataatccgcaccctgcgccgactctgggcgaggaatatgatgacaccccgcgcgacttcggccgtctggccgccgccaccgcgcgtcaggtcatcagccagctgttccgcaaggccgaggacgacaaggtgttcggcgcgttctccgggcagaagggcaagctgatcaccggcattgtgcagcaggatgtgaaggacacctccaatgtgcacgtggccgttggcgacgtcgaagcgttgctaccgcgtcgtgaacaggtgccgggagagcgttaccgccatggtgagcgcatccgcgtgtatgtggtgaatgtcgcacgtggcctcaaaggcccggaaatcgtggtgtcccgctcccatcccgagctggttcgccgtctgttcgaacgtgaggttccggaactggtttccggtgccgtctcgatcatggccatcgcgcgtgaggccggtgcccgtaccaagatcgcggtgcgcgccaacaccgagggcgtcaatccgaagggcgctctgatcggccccggcggtgctcgcgtgcgtgcggtgatggagaaccttgggccggagaagatcgatatcgtcgactggtctgccgatccggcgaagttcgtcgcggcggcactgtctccggcggtcgccaccggtgtgcaggtaatcagcgagaagaaccagaccgcaatcgccttcattcatgatgatcagctgtcgctggccatcggcaaggaaggccagaacgcacgtttggccgccaagctgaccggatggaagatcggcatcgaatccgccgaggcacacgccaagaagatggccgaagcgcaggcttcgaccagcggggaaaccgccgaataaccaacactttcagcagcggtaagcccgtgggcgttcaatccacgggcttgagtatgctggactcgataatccaaagcgtgggggtacgtgccgtcatgcccagggaaaagacgaggtatcacgaacatggttgcacgatgagaaggaacaagctcgccgtgaatcagtagcggtcgcgctcgtatgcgcgcggcccaagataggagaaattgagtgccgaaagcacgcgtatatgaacttgccaaggaacttggcgttgacagcaagactgttttgaacaaacttgaggcgatgggcgaatttgtgaagtccgcatcgtctaccgttgaacctccggttgcccgtaagctgaggaatgctttcgcttccaacgcgcagggcaacgcatccgaatccaagaagcctgcggtcccggccaagaagccggctgccccggcagcttcgcctactcctgcgcctcgtgccactccggctgctcccgcggcatccgcggcaaagcctgccgctccaaagccggcacgtcctggagcatccaagtccgaagccccgaagcccggccagcgcatgcctcgtccgggtgattcccgccagcatggcaatcgtgccaacggcaacgctccgcgtccgcagggcgaacgccgtcagggcggcaagccggctccggttccgggacctcgcgcacagcgcaacaataacaatgccaatgctccgcagggcggcaatggcaacaatgccgccaatggtgcgaagccgcacactccgggcccacgtccgggtaacaatccgttcagccgcaagcagggcatgcataccccgactccgggtgacattccgcgtccgcatccgatgaaccgtccgaacgccaacaacaataacaacggcgaaggtcgtcgcggcggacgcccgggtcagggcggcggccagcgtggaggcttccgtggtcgtccgggccaaggcaccggtgcgaagccgggtcagtggggccagcatcgcccgggtcagggcggcggtcagcgtccggcaggtggtggcaaccgtttcggtggcggcgccaataccaatggtggcggcttccagggcggcaacagcgctccgagcaacggtccggcacgcggcggcggtcgcggtcgtggcggtgccgcaggcgcgttcggtcgtcagggcggcaagtcctcgaaggctcgtaagaaccgtctggcaaagcgtcaggaattccaggagatgaaggccccggtcatcggcggcgtgcgtattcctaccggcaacggtcagaccgttcgtctgcgtcagggcgcatcccttgccgatctggccgagaagatcaacgtcaatccggcggcactggtcaccgtactgttccaccttggtgagatggccacggcaacccagtccttggacgaatccaccttccagatcctcggtgaggaaatcggctgggacatcaagatcgtgtccgccgaagaggaagacaaggaactgctgcagcagttcgacatcgatctggacgaagaagaacttcaggaagatgaagatctgaagccgcgtccgccggtcgtcaccgtgatgggccatgtcgatcatggtaagacccgactgcttgacaccatccgtcgtaccaacgtcatcgcacgtgaggccggcggcattacccagcgtatcggtgcataccaggtgaccgtcgatctcgaaggcgaaccgcgtaagatcacgttcctcgataccccaggccacgaagccttcaccgccatgcgtgcccgtggcgccgaactcaccgacgttgcgatccttgtggtcgcggccgatgacggcgtgatgccgcagaccgtggaagccatcaaccacgctcaggcggccaacgtgccgatcgtggtggccgtcaacaagattgataagccgggcgcgaacccagacaaggtccgtggccagctcaccgagtacggcctcgttccggaagagtacggtggcaacaccatgttcgtcgacatttccgccaagcagggcaccaatgtcgacaagctgctggaagccgtgctgctgaccgcggacgccgaacttgatctgcgtgccaacccggatatggacgctcgcggtgccaccgtggaagcccgactcgacaagggtcgcggtgccgtggcaaccgtgctcgttcagtccggtactctgcacatcggcgattccatcgtcgcgggaacgtcgtatggccgtgtccgcgccatgctcgacgaaaacggcacccatatgaaggaagccacgccgtccactccggtgcaggtgcttggtttgacctccgtgccgacagcaggcgatctgttcctggtggcctccgatgaccgtaccgcacgccagatcgccgaaaagcgtcaggccaccgagcgtgcggcccagctggccaagcgtcgtaaggtcgtgtcgctcgaaagcctcaaggagcagttcgccaaggctgaggtcgacatgctcaacatcgtcatcaagggcgattcctccggttccgtcgaggcgctggaagattccttgatgaagatcgaggtgtctgacgaggtcggcatccaggtgatccaccgcggtgtcggtgccatcacccagaacgatgtcaacttggctaccgtcgacaaggccgtcatcatcggcttcaacgttcgtccgaaccgtcaggtggcggatatggccgaacgcgaaggcgtggaaatcaagtactactcgatcatctacaaggccatcgaagacatcgaagcatccctcaagggcatgctcaagccggaattcgaagaggtcgtcacgtcccactccgagatccgcgagatcttccgttcttccaagttcggcaatatcgcaggtgttatggtgcaggacggcgaagtcaagcgcggtacgaagtgccgtattctgcgcaacggcatcgccaccgtcaatgatctcgaaatctcctcgctgcgtcgcttcaaggacgatgtcaactccgtcaaggaaggctacgaagcgggtatcaacctcggttcgttcaacgacatcgagcttggcgatatcatcgagaccttcgaaatgcaggaaatcgaacgtaagtagtcgattgattcgaaccagcaatcgataacaagaaaggaacgcccacagctgacatacggctgcgggcgttccgtaatacaacagaacttacctgattaaaggacaacaatggcaggaaccaatcctcgcgccgcacgcatcgcggcgttgatccaacgtgtgatcgcatcctccatggaggcgcaattgcacgataagcgtctcacaaacgtgaccatcaccgaagtgcgtgtgaccaacgatctgcagatcgccaaagtctattggacccagcttggccgtgaaggccatgagcagggcgaacgccgccgtgcacagcaggcactgaaccaagccaagggtcgtctgcgttccctcgtgggcaccaaggccggtctgcgtttgaccccgcagctcgaattcgtattcgacgaggtgccgggcgaggcgcatgagatcgaagacattctcgccatcgcgcgcaagcgtgacgaagaactcgccaaggctcgtgaaaccgcccagtatgcgggcgaagccgatccgtacaagcatccggaagaggatgacgacgatgatttcgacgatgatgacgtcgaagtcgaagattgggatgatgacgaagaagcctgaacattccggcctgctggtcatcgacaagccgcagggggtcaccagccatgacgtggtcgcggccgtgcgcggcgccctgcatatgaagcgtgtcggccatgctggcacgctcgacccgatggccaccggcgtgctggtggtgggtttcggcaatgccacgcgactgctcaactacattgtcgaccataacaaaacgtacgaggccaccattcgccttggacagcgcaccactacggacgatgccgaaggcgagctgttgccggcgggggagcgggcagtgaactttccttcgcgtcaagccgtggaacagctgatcacagaacggttcaccgggcgcatcgaacaggtaccgaacgtctactccgccattaaggtcaatggccagcgtgcctatgatctggcgcgcgaaggcaaggatgtggagcttaaggcacgtcctgtgaccatcgaagagttcaacgtgcggcaggcgcgttacggctacacgcatagcgatcgtgccggcacggaacttgctggcgcagtcgtggccgagagggtaggagatggatggattgccgacactgcaccgtatgaagacatgcagcccgttatggaactcgacgtgaccgtgacctgttccgcaggtacctacattcgcgcgctcgcacgcgatctgggtgaggaactcggattgggaggccatctgacgatgctgcgacgcacacgtgtcggcagattctcagtgaatatgcccaacgtcatgagcgcccacgctgaatccaaaacattcaccaatcgtgaaggcatggaagtgacgcgcaatcgtgcagtgcttgacgatgcagatcatgcgctcgatcatgcgctcgatcccgtggccagcgctgcggcttccatgaatatgctggccgtgagcgatcaggaagcggccgacttgcgtttcggacgcagaatcgcgcatgacatacgtacgaccacggcggcgtacgttgaggaaaccaacgatttggtcgccatcctcgaacgtgcgaaacgcggtgaggctaaaccggtcgcggtattcaactgaaccatccaatcagactacagatacgaattcatacacaagaaggacatgatgaagacaatcacgctcacgcctgatgccagcggcatggtggattggcctacgctgagcaacgataagaaatccgtggtgaccatcggttcgttcgatggcatgcatcagggccatcaggcggtgattcgccgcgtggtggaactcgccaaaaaggaacagtctttctccgtggtggtgctgttcgatccacgcccagcgctcgtgcacggctacgcggcgcaaaacggtggccaggagccgccggcaggcatgatcgacacgcaggcgctcaccagcatgcaggagcgtctgcgcgccatcaacaagctgggcgtggattacacgctcatcgtgcgttacacgctggcgttcgcggcgaaatcgtaccgattcttccttggacaaatggtgggcaagctgggcatgcgcgcgctagtgctcggatccgatgcggccatgggtgcgaaccgtgccggcgatgtgaaggccatcgagaatctggcgctcgccaccggcgtgttccagcttgacgtggtcgacgatcgtggaccgggcgaaacccgcgtgccagccaatgcgaagcaggttatgcccaccgaccatggtgagccggccgatccgctggaaggcgcgtccaaggcggaacgtcgcgcatggagcaagaaaaaccaggcgaaggccgtgcgcgtgtggagctccacgaatgtgcgctacctgctgggccaggggcgcatcaaagacgccgacgcgattctgggacatccgcatgccgtggaaggcgccgtggtgcatggcgaggaacgtggacgcaccatcggcttccccacggcgaatctgagcgagaatgtggcaggctatctgccggtcgacggcgtatacgccggttggcttgtggacttgggcgcgaagacggcggacgatgatgcgcagggcgcttccgaaggtgtttcgcagcagttcgattcctcttccgtggacgcgcgacttgccgatcattcgccatatcgttggcccgctgcgatttccatcggcaccaagccgaccttcaacgaggtgaccggcatgaacgatcgcgtggtcgaagcctatgccgtcaccgacgattggcttgatttatacgatcaccaggtacgtgtggaattcgtaggattcctgcgtcctcaaatcaaattcgattccgcacaggatttgatcgatgagctgaagcgcaatgtcgaggaaaccaagcgaattactgcctgatgctaatcacaacgatgatcgcaatgataatcacgataatgacagtgattaatgaatgctgatatttccagtaaaaacgtatcagtattcaaaaatagtggggctcttacgtaagcatttacgtaagagccccacttgtataggttaaaaaataacataatgtatatgcttcgcgtgcatacatgcaaaaacggtatgtagggtgtgtattatcgcaacatggcgccaagcgcatcctgcaatgtgtcgacctgaacgatcgacaatccgggaattgcgatttctctacgtaatgtcggcactacagcggtggtgaaaccaagacgggcggcttcgcgcaaccggtattccaatcgcggcaccggacgcacctgcccggtcaacgaaatttcgccaatcgcacatgtggtgcggctgatcgccttcgatttcgaggcgctcgccaatgcgccgacgatcgccagatcgcatccgggctcgcgcgcctggcctccggcgatggtggaaatatacagatcgttcgccaaaagattgacgttgccatgcctgtatagcactgccaccagcatggcgatgcggttggcgtcgacgccgttcgcggcacgtcgtggcgttggcagtacggatttggtgaccagcgactgcacttcgatgggaagactgcgatgaccgtccaacgtgaaggtcacgcacgtgccctccaccggagagggatctgcggaattggacgaggaaagaaacagtccggacgggtccgtcacctcttcgatgccttcgccgctcatatcgaaacagccgacctcatcagtagggccgaaacggtttttcaccgcgcgcagcatacgcaatgcggtttcggtgtcgccttcgaactggcagaccacatcaaccaaatgttccaacgtgcgcgggccggcaatcgacccgtctttggtgacatgaccgaccaacaataccggaatatcaagcgttttggcggtgtcgatcagcgcgctcgccacttcgcgcacctgagtcgagcctccggagatgccatcgacttcctgcgagacgatggtttgcgcggaatcgacgatggccagcgcaggcttgcattgttcgataagccccagcgcggttgacaggtcggtggtggcggccagaagcagattcggttcgaccgcgccgatgcgcgaggccctcatgcgcacctgcgcctgcgattcctcaccggaaatatagagcaccgtgttgcgttcgggctgtgctgcggaaagacgggcaacattgcctgcggtctccagcagcagcgttgatttgccgatacccggttcgcccgcgataagcgtgacggaaccgggaacgatgccgccgccaagtacgcggttgaattccgtgaacccagtgtcgattctggaaatgttttccgtactgatttccgtgatcggtttcgccgcggaatcgggcactgcatgcgatagcgtgcgcgatgtgcgtccgggagcggcggtgcgtgacgatgcggaggggcgcgcttcatggaattcctcgatggtgccccactggccgcattcagggcagcggcccagccatttcggcccgctccagccgcattcggaacatacaaattgcgaggacgtctttaccatatcgctgacaatacggatattttgggacaatcgttttcggagatattaagggggtgctggtgcgggatgatggcgagatcacggtttctggattcgagcgtctcacggatatgaaagaataacagccatgtctactacgcaaacttcctcttctcatggcaaactgatcgtggctgtcattgccgccgctttggtggtcgtgctcgccttggtgtccgctttcatctggcccggctgggctctgaacaagggcgatgaagcgtccactcagggcaccaccacctcgcagggcgcgtcgcaggatgcctctgagccgaccacgccgtccattgacgctgtggcgttgccggatgacgccagcgaactgttgaaggccatgcctgattccgtgttgaatttcgcgcgcaccaaggccgatgccagcacttcgtggagcggcgcttccccggtcgaggagtacacgttgacgtattccacgggcaaggacggtcaggatatcaccttgaaagtggcgcaatggtctcagtctgatgatgcgcaaagtcagtatgacaatctgaccggtgccatgaccggcaaggagctgggcggcggcaatgtgaaggtttccggtgaagcgaccggcgcctatagcgccaaaaccgatccggacgacgaaaccaaggccatcgcggtctggcgcaacgataccgtggtgttccaagccacgggagccaaggattcggtgcagcgcttctaccagcagttcccgctgtgatactgcctacggctggttgtgcgatcctatgattcatgcatgattcacgtaagattcagccgtggaccatgcggactgcgtttgcctgatcttccgataaaaaggtgcgtgcttccaccatatgaatgcggttgtgtgtgttagtccccgaagcagtgtagtattgggcaagttgcaaacttttaccctttgagtttaagaacggaggctgagatgggctcggtcatcaagaagcgccgcaagcgcatgagcaagaagaagcaccgcaaactgcttcgtaagactcgccaccagcgcaagtagtcttcaggcgcggttgaagcgtcgcttaaacaaaatcccgtatgtcttcttgaggtatgcgggatttttgcatattgcaaagaaataaacgaaaagtacgagaatcggaaatcaatagatgcaaaaagaaggctgtgcgttcgaagttgaacgcacagcctcatatggtttcgtgtaggttcgcgaaaatccgcggaaaatgcggaacttacgctacttcaaactcacttgttggagttggtgagcacgcgcggaccgttgggatcgcccacgatgacctggtccaccatgtgcaggaacaggccatgctccaccacgccaacggtgttgatgagatcgtcggccagagcctccgggtgttcgatgcattcgaggtgcagatcgaccacgtagttgttctcgtcggtgcgcaccggctggccttcggcgtcgaggcgaagcaccggcttgtagccgcgggattcgaacttcttgacgacctggcctgcgccgaacggaatcacctcaaccggcagcgggaacttgccgatggtgtccacaaccttggactcgtccacgatccacacgatcttgttggagttggtggccacgatcttctcccacagcagagcggcgccgccgcccttgatgccgttgaagttcttgtcgacctcgtcggcgccgtcgatggtcacgtcgatgtgatcaacgtcatcgatgtcgacgatcttgatgccgtagccttctgcctgctcctgagtgcggcgggaggtggtcacgccggtgaactccaagccttcctcctgcacgcggcggccgagctcgtcgaccaggaagcgcacggtcgagccggtgcccagacctgcgatcatgccgttctgaatcagcttggcagcttcgatgccggctgccttcttcaatgcgtcctgctgtgccttgtccatgatcctccttcgatatggggttaagaccgtctccatattatcggatgtgttgatttttgtgcgtttgcggacatgtcatgaacgaaggtgtgccattggtggtcagcaaatgttttcacaggatgtttcacgcactttcgaggcgttaaggtcgaaagtgctggctcgttagttgtgcttgactgcaaatggcgcttcgtcgaggacgagcgtgccgtcgccttgcacgtagccttccaccgcgatgtaaccgcggatcaggcgtggcttgccgtcgaacgtcggactggaatttggcgggggagtgaagcgaatggcgcccgacaccgccaatcccgaaggactggcgcgatgcggcagtttcggcaagtcggcgacggcgttcgttggctccgacgcgtttgcggattcggctgattcgctcgttggcgccggcgtgttttccgaggaattcgcggattgttcgttctgtgcatcgtcggctggctgccgctcgtcatgctcgtggggaaaacagtccggcttgagcagcatttcggcatacgatttgcgcggtgcctcggcgtcaggcgtcgtgccatcaggcatggtcgtatcaagcgcggtggtcggttccggcatgtcgtcggattccaccgacatttcgttggacgtcaacggcaatgtcgcctcgtcgggcgctggatagccttccggctccaccagcatatcggcgatggaacgcggacgcggctccggatcggccgcgcccatcagatcatcggccaacgatccttgagcggacttgccttgcccgcgccccatatggtattcgtccgtagtgattttgccgtcaagcagcatttgggcatcatcgggaacatcggtaccttgcgaatattcggaagccagcagcgactgccaaccctccaaaggaagatatccttcacggatcttcgaacggcaatcgcccgcataggtgcgcgccagctcgtccaccttctcattgccggcattgccggcatgacccttgacccatacgaatttcaccggtccggggcgcttggagatttcggcatcgatcgcgcgaatcagatccgcgttctttaccggcttcttctgcgagttcttccagccgttcttcttccagccgtgaacccacgtggtggaacagttgatcgcatactgcgaatcggtttcgatcaccaacggttcggagccggggtgcgcgcgcaacgcctccagcaccgcgcacagctcgccaatctgattggtgccgttcgtagctccgccggcatcgcagtcgctgtcatggtgatgccccggcttgccgcctgtggcaagctcatgatcggcccaaccccaacccatcggaccattcggattgcctaaagcggaaccgtctgtagaaaccgtaatcgtcatatctctaccctacgaaagccgtgagacgctgccatacgtggtgaactgcgaactgtgatcgggcgacgtcgaacgggaatctcaatcatccaaacacagcatgacggaagcgcggaacagcgtgccgtcataatcgaacgaggtcgcgccatgatgccgttccgcggtttcgcgcacggtggcggtgcccaaaccttcacccccatgcttggttgaggcgaaagcgtcgccaacctgcataatggaggaatcgtgcgtgttgtcgaccacaatgaacagtgatgcgggcggcccagtgcgatatttgatgcgcaccctgagttttttctccccatcctgttgtttcataatggcctcagacgcattttccagtagattgccgaccatggaacataattcggcattattgatgttgagatattgcggcaccgacgctttgacgtcgacttcagcccctatatggcggatccaatcacagtagtagaccagcaccgcgttcaacgaagcatgttcgcaatactgcatggggatgggctgcaacagcctatgattggccatctcctccaaatacgaggtgatgccgggcatatcgtcggccgcggcgagagcctgcaacgtctgaatatgatgccggatattgtgcttgatctgcctcgcttcgttgatgcgttcgttcatatgctgcagctgcaaggtctgcatggcttcgtaatgttcgcgtttgctggcttcgcgcagtcggtccgcctgctggatcatataccagatgaggaagtaggccatggtcatgaaaccggaatatgcgatggatacggtgaaggcgatgctaagcacgcgggtgtcgagcagcgatgcgttgtcggcgggcatgcaccacaccacaattgctgtggaaatgaacggaaaaagccagatgaccctccaaaaattcctgctgatggaaggtgaatcgaatgttgcggaaaatgaatgatggaacggatggaaaagtgtagtcgccgcaatcaaatcaaaaatcagcagactgatcattcccggccatccgacacgtaaattcatggactgctcattcagaacagctaaatccacggccaaagacaggtaataaacgatcgcgacgatatatgcgactgttgaaacgacgaaaagaagctgcccccaaggaagattcgtcatcttacgtaaagccaataccacaaccggagccgaaggaatcacggaccagagcgaggggacgtgggcgaggcaacatgcgatgccgcacaggaagaagacaatcacgccggaaatcatgagaataaggccgtcgcgcttgggattctccatatgatgccaggtcatgtacaggcagagaagcaggcccgttagcgcgtttagctgctcgccgatggcgaagaacatgcatgatggcgcgatcgatgcgagtgcgtcaagcatggctagtcttccattctcatgcgggtgaacgtgtattccgcgtattttctgcaggtggtggtcaccgcggttttcgtgatgggaatgtgcttgccgcctttcatcacgaattcattgctgctgatgcctgacacgtagtcgaagttgacgagcactcctcgcgcggtgcggtagaagttgctgaatacggtgagacgatgttccacatcggagaagttggtgcggattttcgcgcaggtgccgtcggcgaaggtgaattccacataatgcgcgctggaaagcgcgtaggcgataaggcgacggtccatggtgatggcgggattgccgaacgccacctgccatgcggcgtccgtgctgctttgtgcattgcccgtcgattgatgttttttcagatgagtgaccggtgttttcgtgtcgagctgcgctgcgacgcggtccatggtcgcatggaacgcgtcgtgattcaggggcttcaacagatatccgcttgcctgcacctcgtagccgagcacggcgaaatcagtgcttgacgtgatgaacacgatcgggcaatcgtcgttttgtctgcgcagcgtccgtgcgatatcaagtccggtcgccgcatgcgtggcggtttcgtcgtccgacagatagcagtcgagcagcagcaggtcgtatcgggcgtctttccagctttcgatgaaggattccgcatcggcgaaggtcacgcattccacgccgatatcgcgggtgcgtttgaaatattccgcgcacatgacggccatcagttggcgttcggcggcgtggtcttcgacgatggcgatgcgcatcgttcacctcccatgaagattggcggggaccgctggactgagcgttgtgtcgctatcattcaagcgtaatgcgaagcggggccggcaggagggtgatagcgtgcgtgtcatgccagaattcggcgtgtcatgccagaattcggcgtttcgtgccatatcgcacgattcgtgttcgttgcgattcgtattcgggcggatatgcgagaagcccgcctttctcaggaaagcgggcttctcagtgagtttgcgaatgattggcgaatggctggattacgccgattcgtcaatgatcactcggccaaggccttgtccacgacttcggtggcttcggcgagcaccttgtcgagggcttcgggggattcgaaggactcggcgtacaccttgtagatgttctcggtgccggaaggacgggccgcgaaccagttgttctcggtggtgaccttcaggccgccgatcttggcgttgttgcccggagcctcggtgagtttggcggtgatgttttcgccggccagcgtggtggcagcaacgtcgtcgccggaaagcttggcgaacttctgcttctgctccaacgtggtcggggtatcgattcgcttgtaccagctttcgccgaagcgttccacctgctcctgatgcagctgtgccgggttcttgccggtcttggcggtgatttccgcagccagcagatccgggatcagaccgtccttgtcggtggtccacacgcggccgtccttgcgcaggaagctcatgccggagctctcttcgccgccgaaggcgacttcgcccttgaacagcgggtcaacgaaccacttgaagccgaccggaacctcaacgagcttggcgtcgatggaagcggccacgcggtcgatcagggaggaggacaccagcgtcttgccgatgccggcgccttccggccagcccgggcggttgccgccgaacaggtactctacgcacacggcgatgtagtggttcgggttcatcacgccccagttcgggcatacgatgccgtgacggtcggcgtccggatcggtgccgccgaccaggtcgtacttgtcccaagcgccgttgttgagggagtccacaagacccttcatggcgtacggggagctcggatccatgcggatcttgccatcatggtcgatggtcatgaagctccaggtcggatcgacctgcgggcgcaccacgtcgatggtcaggttgaacttctcgttcatcagcggccagtagttgacggaagcgccgccgagcgggtcgatgcccaggcgcacgccggaggaacggatcacatcgaagtcgatgacgttctccagatcggcgacatagtgctcgcggaagtcgaagcgctcgaccaggtcggacttgacggcctgctcgaacggaacgcgcttgatgttcttgaaatcgccgagcagctcgttggcacgatccgcgatggcgttggtgacgtcggacggagccgggccgccggtgaccgggtcatacttgaagccgccatcggtcggcgggttgtgcgacggggtcaccacgatgccgtcggccaggccttcgccggtgaagcgctgggtgccatccgctgcgcggttgtgggtcaggatggcctgggacacaaccggggtcggggtgaagtcgtcgcgggaatcgatgcgcacggtcacgccgttggcgacgagcacttcgatggcggtcttccaagccggctcggacagagcatgagtgtcgcggccgatgtacagcgggccggtcacgccggccttcttgcggtattcggcgatggcctgggtgatggcgatgatgtgggcctcgttgaacgaggtcttcagggacgatccgcggtggccggaggtgccgaaggagacacgctgctcgggaacgttggggtcggggacgacgtcatagtacttgccgatgacctcgtcgacattgatcagatctgctggggtggcgggcattcccgcattgtttgcaaccatagccactattctgccacgcttttgctgcgaatgtgcgtaattgtcccattatgtgcgatgaatacgttgtctgtttagtgcatgttcggatgtgtgtacatgaattttcgaaaatggcggattctgcgcttagccgagttgcgcaatgtcaaacgatggtgtatagttctatgctattcgactgatgcagggttgctagtcaacataaagacgcaagacctgagatgtggctgaactatagccatatctcaggtctttttttgttgcccgaagcggtgttgctcggatcgaatcggttgtaagggaaagaaaggaaatcaggatggctgactcactcgcatcgcagatcatcactgcaatcggtggtcctgaaaacgttcgcagtctgacgcattgcgccactcgactgcgctttgaactggttgacgcatccaaggtcgatcagaatagtctcgagcacatgcagggcgtgctcggcgcggtgccgcagagcggcgaccgcttccaggtggtcatcggcggtggcgttgccaccgtgtacgaaaacatcatgcatctgcccgaaatggccggtgtcggcggtgcctccgcatccgacgatggtcagaagagcaatgccgacgtcaaggccgaagcccgttccaaggcccgcggcaaggtggcttggctggactccttcttcgagtatctctccgattccttccgcccgattctgggcgtgctgctcggcgcttccatcatcatcgcgctggtcaacctgcttatttcgctgaacgtcattccgaatgacgaggtttccgcaggctgggtattcgtgaaagccatctggaagggcgtattctacttcctgccgatcatggtcgcctacaacgcgtccaagaagctcaaagtcgacccatggctgggtggtgccatcatggccatgctcatgaccccgcagttcaccggcttgatggacgccaagaccaccacgtgcgtggagaacgccgctctgggcaccaagtcttgcatggccaacatattcggtctgccgatggcattgagcgactattccggcaacgtgttcgtgccgctgctcatggccgccgtgcttgctctcgtctaccacggattgaagaggatcatcccggaaagcgtccagctggtcttcgtgccgttcttctgcatgatcatcgttggcgcgctgaccgcctttatcatcggcccgatcggcgtgtgggtcggcaacggcctcggcgtcggcttggcctggatgaacacccatgccccgttcatcttcgccatcatcattccgatgctgtacccgttcctcgtgccgctcggtttgcactggccgctcaacgccctgatgctcatgaacatccagactctcggctacgacttcatccaaggcccgatgggcgtgtggaacttcgcctgcttcggcgctaccgctggcgtgctcttccttgctgtgcgtgacaaggataaggacatgcgccagaccgctttgggcgcacttgcggccggcctgctcggtggcgtttccgaaccgtccctgtacggcattcacctgcgttacaagctcatctacaagcgcatgctggtgggctgcggtctcggtggcgtcgtcatcgccatcctcggttggctcttcccgtccgtcaccgccgccggccagaccgtgcatggcgtgaccaccaccgctttcgcattcacctcgttgctgaccattccggttttcaatcagatgtgggtgtatgcagtgtccatcgccgtgtccttcctcacctccttccttctgatcatcaccttcgactaccgcactccggaacagaaggccgaagtgctggcccgtgcggctgccaatcagaagaccgctgtctcgtcggtcgaagccaagggagtcgctccggctgctgccaccgcgactgccactgttgccgccaccaagactgaagccccggctgctgctgccaccaccaccgtggtgaacgctccagtcgcaggccatgtgatttccctggatgaaaccggcgatccggtgttcgcatcccgcgcactaggcgaaggcgtcggcatccagccggcagacagcaccgtcgtcgcgccggtatccggcgtgctgcagaccgtcgccgaaaccggtcacgcattcggcatcaaaaccgatgatggcgtggaagtgctcgtgcacgtcggcatcgacacggtgaagatgaacggcgaaggcttcgatgtgaaggtcaaggccaacgaacacgtgaacgcgggggacaacctcgttgtcgtcgactttgataaggttaaggaagctggatacagcaccaccacattgatgacggtgctgaacacagtggccttcgcgtccgtcacgccaaagaccggcgtcgacgtcaaggccggtgagtcggtgatcgacattcagcgctgaccaatcgcatagtcggaaggggccgacgtggacgttcttcgcgtattcaacaataatgtcgtactggcaaaagacggcaacagtgaggtgattctcaccggtcgaggtataggtttccaagccaagcccggccagcatgttgacgacgcgaagatcgtccgtcggttcgttcccgcagatggcaaggatcccgaccatatggcccaacaggtggccgggattccgcccgaaatcattcgtctcgttacggacgccatgaaccgcaccggtctgaaggaacaggccgacagacagcctgcattggtgctggcattatccgaccatatttgcggtgcgatccgccgatcgcaaaacaagcagaccatcgaatatccgctggaagccgaagtgcgttcgctctacgcgagcgaatatgccaaaggcaaagctctggtcgatgccatgaacacgtatctgggcggtgcgctgccggattgcgaagccgtggctttggccctgcacttggtcaatgcgggcttctctaccggcgatctttccgccacatacaccatgaccggcgtcatccagcaaatgctgacggtcatcgaaggctattacggcatcactctcgaccagaacagcgtcaatgtggcgcgtttcatcacgcatctgcgctatcttttcgtgcgcatccaccaacatgaacagcttgatgacgagcctgaaccaatcgtggaatccatcaaaacctcatatccgaaagcatcggattgtgcgaacaaacttgcgatcatcgtcaaaatgcgattgaacgtgagtctttcggaagcggaaatcgcctatctcaccttgcatgtcgcacgagtgacttctcatgcgacggaatcgcatgagaatgacgataccaatgcataatctgcataaaatacataatcatcgtaataaataatttaataattacgataatagttactgatttacattggaagtattggctttgggcgcttccggcacgcgcacgcacaaagacttacgctccacactgaaacgaatgtgctgcgtttcgggaagcatgtcgccatccacctgagccaacacgggcttctccaacttgatttccgcgctgacgccctgaatctggtcaaccgtggaattcgtggacagcggactctgctgggccttgccggtgatcgtctgatgcagcacatcgccgaacagattcgcccaaccgatcaaaccgccggatgtgtcaatgatctcgtaatcgagaatgccgtcatcgtacacggcgtcgggcatgagcgaaaataccggaatctggccgcaattgccggccatgaacgtgcggaaggtcaatccgtgcgtggtgtgcgtgctgccgtcggcgctggtaatggtcacatcacccttgtacttcggggcgaacaggttcttcacgcccgacacgaaataggcgagccagctgatgttcttcttcaactcaggatcggtgtcgtcgatcatcaccgcatcaaagccgatgcccgcgataataaggaacgcatggccgtgatcggcggcttcatcatcgagcagcgtcagtcggccgacatccaccaaacgcgaaccatgagatgtggcgacggtcagcgccgcatcgatatcatccacaggaatgcccatattgcgggcaaacagattgccggtgccaatagggatgatgcccagcgcgtggccggttcccgaaagtgcgctcgccaccgtgcgcaccgtgccgtcgccgccgaccgcgaccaccacgtcggcgccatgctccaaggcttccagcgcgcaggcgcgaccatccttatcaagctgcgttccgatatattcaacctgcgtgagatgcttcgcctcgcagaactcctgaatatgctgcttgcgttgttccgcctgcggtttcgaaggattgatcacaaacgcgtaatgcacctgatcatcgtcgcgcttgtcgagctgttccgcaagtttgcgatgcttatacgcgcgtactgcgaaaaaggcggccgcgcacaccgctgcgatcgcaagaacgacaatcagaatgataacaggcataggcatgtcatctattgttcacggaagatgcgaaaaaagcgaatcaagactgatttattcgacgattcctgcacgttgtatacaaaaatgagaggactgcggcgggtgtcggctttcagcactaggctaggaggcatgcttgatatccaattcattcgtgaacatgctgacgttgttaaggaatcccagcgcaagcgtggcgaatcggtcgaactggtcgacgaggtgctgcgctccgacgaggttcgtcgttcctctctgaaggaattcgaggctgcccgtgcgcagcagaaggaaatcggcaagaaggtcgccgcggctccggccgacgaaaaggccaagctgattgccgaaaccaaggaactctcccagaaggtttccgaatacaaggccgcagcggacgccgcagccgaagaatacaccaccgccatgtggaagctctccaacgtggttgagccggaagctccggaaggtggcgaagacgattacgtggtggtcaagaaggttggacagatccgcgatttcgcagccgaaggtttcgagccgaaggatcacctgaccctcggtcgtggcgttgccggcatcgatatggaacgtggcgtgaaggtcggcggttcccgcttctacttcctgcgcggccaggtggcacgcatgcagatagccatgctcaccatggctgtggaccaggccgaagagcacggcttcacgctggccatcaccccgacgctggtgcgtccggaagtgatgcgcggcactggcttcctcaactcccacgccgacgaaatctaccgtctgcgcgaacctgacgagcagtacttggtcggtacttccgaagtggcgctcgccggtatgcacgagaacgagattctcgacctgtctgacggtccgctgcgttactgcggttggagctcctgctaccgccgtgaggctggcgcagctggcaaggatacttccggcatcatccgcgtgcaccagttcgacaaggtggaaatgttcgtttacaccaagcaggaggactcctacaaggagcatgagcacctgctggccatggagcaggaaatgctcggcaaggtcgaggtgccgtaccgcatcatcgataccgctgccggcgatctgggctcttccgcagcccgcaagttcgactgcgaggcgtgggtgccgacccagggtcgctaccgcgagctgacctccacctccaactgcaccgaataccaggcccgtcgcctgaacattcgcgaacgtatggaagatggcggcacccgcgccgtttccacgctgaacggtacgctggccaccactcgttggctggtcgccattctcgagaaccaccagcagaaggacggctccatcgtcattcctcaggccatgcgtgcctacatgggtggcaaggaagtcatcgagccgaccaagtgggaagcctgataaagtttgggtttgcttggcagagtctgatagcttgggtagctcgttgagtgtggcgactcgggtttgtttatcggttccactgagttgctggtctgctgaactgctgagctgttgaaacggacttctgcaatacgaaatctggaagtctgaggatgcctggcatttgacatttgccgatttctggcttttctggcttatgggaagggactcgcggtgagcgggtcccctcttttttgttttcgccgcgttctttcctttgtccttgctcgctttcttcccctcgttctttgggttgtgctatattagcgtttcgtgcgtgatgcacatgggtaggtgtctgagcggtctaaagagacggtcttgaaaaccgttgaggtgcaagcctccgcgagttcgaatctcgccttacccgcctataaggcttactgagagcgctctaagcgcccggtaagccttttttgttgctgcaatccgggtaaactccacccaagttcggctcagcaccgtccaagtctcaattcttccatccactggaacaatcttcccgctgttggccctgtgagcgtccagattcttccagtgggtggaggatttgggttgctgggatggtctgtggcggggtgattcttccagtgactgggggatttttcccgctggggggcttgtgggcgtctgtttttctccagtgggtggaagatttgggtcgttgagaggcttgtaaatgtccactttcttccagtgactggaaggattggggagggattgtgatgttgttcggtgtacgatcaggctgagttgtgagaaaggctgctgtgactatgcgtgagaatgggatgcaaatgaaggaacgagcgatgggagctatggctgggcttgcgttgggcgatgcgttgggaatgcctacgcaaagcatgtcggccaagcagattcgccggtattacgacggtccgatcacgaaacttatgaatgccgtgccgcagcagccgatcgcaccgaatatgaaagctggtgccgtcaccgacgatacagaacaggctttcgtactcgcacggcgacttatcgacgataacggctgcattgataacacccgatacgcccacgatctgctgcaatgggaagctgcgatgaaggccaagggatcgcttgacctgctgggaccttccaccaaagcagcgctgcaaaaacttaccgaaggcgtaagtctggaagagaccggccgattcggcaccaccaacggcggtgcaatgcgtgccacgccggtgggcatcgcattccgtccaggccaagcgctcgccgacgccgcctggcgatcctgtgtggtgacgcataacacggtgcagggcattgaagcgaccactttggtggctgcggcggtgagctttgccattgaaggagaacgtgactttttgcacctcgcggtggaattcgtacggaagcttccacagcgtggcaattggtcggcaaaggcttcggtgcttgcgcgtgtgcaatatttcatgaattgggccgaaactgatggatgcaggctcaatgacaacgaattcgctgctgtgctgcaacggaattgcggtaccagcgtggaatcgaacgagtccgtggccgccgctttcgccattgcggcgcgtttttttgacgatcccacgcatgctttgtgtttcgcggcttctatcggtggcgacactgacaccattgcggctattgcgggcgcgatgctgggggcgtggcatggtatgcaaggtttcgacaaaaccatgcttgatcaggtgctttcacaacttgctgaagataatcaccttgatttggtcggcactgttacgtcgctacgcgcgttacgcgatgatagtgcgcttaatgatgtaaatatcgtttgatctgcaggaaccgtagttagcgaaactatgacggaagtgcgaaaggcatcgcaatgactggaaaagttatttctcttgggcaggttattgtcgatctgaccatgaatgtggacgcggtgccgcgtgcgggtgaagatgtgttcgccggcaatgtgcaaacgcaggttggtgccagcttcaacacgctgtatgccgtgcgccgcatgggcgttaaggcgtctcatgctggtgtgattggtacggggccgtgggcttcgcagattctgcaaacgttggaaaatcaggaaattcagcatatcggcaagcgggatgccgtgcacgattcgggattttgcgtggcgttgaccgacgcgaatgctgaacggacgttcatttcgacgaggggcgcagaagcgtacggcagtgccgatgcgttcgattctgtgaatccagaaaagcgggatgtcgtgcatgtgagcggatacacgttggtgcatcacactgcggacgcgctgcttgcttttgtgaaaagaacgactgaacatcgtgagttcactgcggtattcgatccttctccgatgatctcggcagttgatgatgacgttttccgtgtgatgctcgcatatcgtccgatatggtcgtgcaatgaacgcgaggcaacgttgattgcgcaacgtttggcggcgctcgatagtggcgattcttgcgattgcaaggtttcgcgggatatgctgcaagagattgagagtgcgaatgtcaatgaggagacggttgcgtggctgtgcgatcgattgcaatctcctgtaatcgttcgcgtgggcgcggatggtgcgtggtcggcgattcccggtgacgaagtgctgcgaattccaggttttccaatgaaagcggtggataccaatggcgctggtgattgtcacgcgggtgtgttgtgcgccctgctgtgcgaaggcgtgccgttggaggaggctgtacgttgcgccaatgctgcttcggcgttgtctgtaacgcgatcagggccggctacctgccctgatcgaaaggaggttgagcggctcctaggaagggcgttctaagacttatggtacaaatgactataagtggttatatcatgtgcacgattgcgctgacgcggcgtgcatgtcgcttgcccgcggcgttgctcggcagattcaaggagattagtttcacatgagcaatgagaaagggaccctctccatcgaggagcagggtatcgacaccatatccgaagaggagcgtaagggcacgccggccagtctgttttggccctggttcgctgccaatgtttccatgttcgccatgtcgtacggcgcgtgggcgctcggtttcggcatttcgttctggcaggccaccgccatgaccattattggcgtggtcatctcgttcctgctggtcggcatcatttccatcgcgggcaaacgcggcaacgcgcccaccatggtgctcacccgcgccacgttcggcgtggaaggtgccaaagtgccagcggctctgagctggatcgccacattaggctgggagatttcactgaccaccaccgctgtgttggcattatcaagcaccatcgaaaaactcggttggggctctggtgtcgcgcccaagatcatctccaccattgtggtggtcggccttgtggtggtcgcaggtattttcggatacgacctgattatgcgttgtcagcaggtcatcaccatcgtgaccggtgtgatcaccgtcggtttctttatcctcggctggggacatattgacttttccgccattgactcggttccggtgggatcattgccggccatgctcggctgctgcttcttcgtgatgaccggctttggcttgggctgggtgaatatcgctgccgattactcgcgctatctgccgcgcaactcctccaatggcggcattgtgttctggaccacattcggtgcgtccattgccaatgtgttcctgattttctacggtctgctgctcgcggtttccaatgccgacatggcggaaaacgttggaaatgatccgattggagccatggcttccattctgccgacctggtacttgattccgtacaccattgtggccgtgctcggtttgatgtccggctccattatggacaattattccaacgggcttgcgctgctgtcgttcggtgtgaagttgccgcgcactgtggctgccgcgctcaccgccgctttgactgtgcttggcgtggtctacgtgactttcttctccgacacgttcattggcccgttccaaggttttctgaccacgcttggtgtgccgatggccgtatgggccggcatgttcgtggctgacgtgatcattcgcaagaaggattacagcactgctgatttgtatgatccgaagggtcgttacggtgcatggaacggtaagtctttcgccattctcgtcgtcggtaccgtgcttggttggggattggtggtcaacactgccgccagctggctgaactggcaggggtatctgctgttccttatcgggggtaaagaaggtagttgggctgccgccaatcttggtgtgattgttgcgctgagtattggtcttgcgggatcgttgatgttccagcgtggtgatattgccaagcaggaagctgatctgccggtttcggaagcatgagttgcttgttgcgataatacaaggaaaggaaaagtcatgattgcggaagatgaatggctggtagttatcgacaggcagcgtgtttttgcggaaagtgaatggtccgcatgggcttgcccggacggctcctatcacactactgatgaagcgttcgcacgattggctaaggcgttcggcgatcgtgtggtctacacgcgatatgttgcgcctgagccgccgcaaaacgcttgggtcgattatttcaaggattggccgcagtttttggttgctcccgacgatccgatgtacgatctcaccgcggataccgcggaattggcaaagggccatgcagtggtcagccgcgacactttcggcaagtggggaagtgagttgagcgaagccatcaagggcgccaagaagattaccgtatgtggtgttgccaccgattgctgtgtgcttaccactgtgctcgccgcggctgacaatggtgtagcggtacgcgttgctgctgacgcttgtgcaggcagttcgccagaaaaccatcagatggcattgagcgccatggcattgttcacgccgctggtcaccgtcactgatactgattccatcgtaggataggtaaggactttgattctgcggggtttgttgagttctgctcagcaagccccgcttttttgtatgtcgtgcatattgcgccaaaacttggatgatgctcggctggcatcggtaatgagccattaatcttgcggtgcgcttttgtaactgcggcgtaacagtgcggtggtgattgtaacggacgattccggcacaatcgtgggtatcgacagtttcgtgaagaggttttactgacggacatgtctctcacaggaaaaatcccatgtatgaatcgaggccaccatggcacagcagatcactagcttgcttgacgatcctacgcaagcggtcagtctagacactttcagtgggctcaccaaaggatgccccgcaccattctggcttttccaaggcgtttgcgcggcttggggcatcgaccaccagcgggcgcaactcaacctcatcaccgtatccgagaacgcgacgttcctgctgttgctggacggcgagccccaaggcgtggtacgtgtctcgcagccgggctatgtgggaggtcccgaggcggtggcgtcggaaatcagctggttgaatgcgttgcatgatatcgaaggtatcagcctgatcaatccggttcccaccatccgtggcacgttcgtaacgaaaatcactgatctgaacggtgtcggctggacggtgatctccacgaaatatgtggaaggaaccgtgctggaagatcttgagaatcctgcaccgtattacgagacgatcggtgaatgggctgcgaaattccatgagcagtcgcgcacgtggagcaaaccgtacggtttcacccgcttcaattgggatctttcgaacatggttggtccggcaccgcgttggggacgttgggaaaacgccaatctcaccgacgaagagaagcagctgtgcgacaccgcgctgtggaaggccatggacgtggtgatgaaagtgccgagaaccaacgaaacctggggacttatccatgccgacctgcgcccgtcgaacgtgattcgcggcaatgacgggagactgaccgtcatcgatttcgacgatgccggatacagctggtatctctacgattacgcttcatcgctgagtttcatcgaacatgaaccgtatgctcccgatcttgccaaggcgtgggtcaagggataccagcgcgtcgcaggttcgttcacggatgaggaactgcgtatcatgtccgcgctttccatgatccgacgcatgcagatgctcggctggaccaccagccaccgtgaggatgccctgcccgacggtctcgctgcacagcaggctcccggcagcgtgatgtgcgcaaaaaactatcttgaggatccgctctggctgctgcattaggcaagttgcatgaaacaagcgtaattacgcagaaaccagacaatccaagaaatccaatcgtaagcacataaaaatacgcaattacgaaaatctcaatttttataacttaacaacatctgaccgcaaccaaccaaacgaggaatcaatggcataactcgccgaacaataagagaggaaggcgattacaatgactgcgtcaactgtttcgggacgatcgataggcggcgtgacctacgttgaaaccgacaaggactatttcgcaaaacgacagcttaagcgaaccgcgggagcgttcggtctatgggccatcggcatttccgcggtgatctccggcgacttctccggctggaacggaggcatcgcccaagccggatggggtggcatgctggtggccgccatcgtggtgtacctcatgtacgtgcttatgctcaactccatcagcgaaatggcgtcggccatgccgcacacgggtggcgcgtattccttcgcgcgtgccgccatgggtccgtggggcggcttcttcaccggccttgcggaaaccatcgagtatgtgatgaccgcagccaccatcgtctacttctcgtcggcatacgctgatgcgatcctgtcgaacctgaccggatattcgcttgacgatcatggcttggcttgggtttggtggcttgccttgtatgcgattttcgtagtggtcaattggctgggcgccgaaacgtcgttccgtttcgccgaagtcgtgtcgatcgccgcgctcgccatcgtcgcactgttcggtatcggcgctttcgccactggtaaggccgatttctccacgctgctcaatatcacgcctaccgaaggcaactccgcgttcctgccgttcggcccaggtgccatcttctacgccatgccgttcgccatgtggttgttccttggtattgagcagctgcctctggctgcagaggaagtgcgtgagccggaaaagaacattccgaagtcgtcccgcctgtgcattttcacgctgggattgtccgcgctgatcatcgtgttcctgaacccggctgtggtcggttccgaagcgctcgctggttccgatgagccgttgctggatggctatcgtgcgattctgccgggcaatctcgccgcggtgctgtccgcattcgcgttgatcggtctgctcgcttccatccaaggcattatgttcgcgtatggccgcaacctgtattcactgtcccgtgcaggctattatccggcgttcctgtcgctgaccggtaagaagaagacgccgtactggggtctggtcgtcggcgcgatcatcggtttcgcagccctgttcatcatcgcgtacggcggtgatggcgccggttcggtggtgttgaacatcgctgtgtggggtgcggtgctggcatatctgctacagatggtttcctatgtgatcctcaggaagaagatgcctgatatcaagcgtccgttcaccagcccgttcggcgtgccgggcgcggtaatcgcaggtttgcttgcattctgcattttcgttgccgtgctgctgaacccggattatcgactggccgtctacgccatggtggtcatctacgttctcgcgaccatcttcttcgcggtttacggacgtaagcacctggtgctttctccggaagaagagttcgccgcttccggcggaaaggtcgcatataagactgaagactgactgattttctgcgattatcgtttcgttttcttgaaataaaacgatattgccaaggccgtgttcatctgggatgcggcctttttcaatcatcggaaatatgtaaaaaggtcaaccaaataggtggaaaacagcggaaatggtttgtttctgcgctgtatcagccactcaacattactgcgttaccgtgtgggtaacgccacaggaagccaacgaaagaaggaatcatggcaactcgatcaaccatcatggacaccaatagcttccgtccggaaatggcggccgcgctcgacccagaaacacgcaaactaaccgaagagcgtgacgtgcttggtccggcctaccgtttgttctaccgcaatccagtgcatctggtgaagggccgtggctcgcatctttgggatgccgacggcgaggaatacttggacgtgtacaacaatgtcgcatccgtcggccactgtcacccgcgcgtggtggatgcacttacccagcaggcttcgatgctcaacacccacacgcgctacctgcatgagaacatcctgcattatgcggaagatatcctctccaccatgcctgacgaacttgaccgcatcatgttccagtgcactggttccgaagccaacgatctggccattcgcgtagcacagacctacactggcggcgaaggcgtgatcgtgaccagcgaggcctaccatggcaattcggcactcacctccaagctttccccagcgctcggcaccgcgcaaacgcttggcttgaccatgcgcatgattcccacgccggacacttaccgcttggtcattgacggcaagcctgccgcggaatgcgccgccgaggaattcggcaactggatggctggcgaagtgcgcaaggccgttgccgatatggaacgtcatggcatcaagtttgcggcattgcttgccgactccatcttctcctccgacggcgtgtaccccgatccggtcggctatctgaagccggtgatcgacaccgttcatgaactgggtggcgtatggatcgccgacgaagtgcagccgggcttcactcgcaccggcgacgcattctggggattcggacgccaaggcattgttcccgatctggtcacatccggcaagcccatggccaacggtctgcccacgtcgatgatggccgcccgccacgaagtacttgaaccgttcgcaggctccattccttacttcaacactttcggcggcaacccggtatgcatggccgcggcccaggcggtgcttgacgtgatgcgtgacgaagacaccatgagcaacgccaagaaggtcggcgcaatattcaaggatgccgtcgcgtcgcttatgccggcacacccctgcatcggcgacgtgcgtggcgcgggcctgtacatcggctgcgaaatcgtcaagccgggcaccaaggatcccgaccagcaggcagcgctcgatatcctcgaaaccctgcgtgacaaccacatcctcacctccgtatgcggccgttacggcaatatcctcaagctgcgcccgccgctggtgttcagcgaatccgatgtggattggttcatggatggattcatgaagactctggaaacattgaagctgtaaaacgacagataaccataaagaaagggcgcggatatggaagatcataccggcatcaggcgcacgcgaaacgctacgagcgaactggtctaccgtatccgcgctcgcattcgtgaacaggagcttcttcccggagagaaactcggatcggaacgggcgctcgccgacagtcttggcgtcagccgttccgatttgcgcaatgcgttgaccgtgttggaatccgatcatgaaatcatccgcaaaatcgggcgtgccggaggcatcgtcatatcggacggacgtttggaacgcaatatcaacacggtggaatcattgccgacgatcgcgcgaagacaaggcatgcgcgtttcgtcgaaagtattgcaggcggtgattgccccggcttccgtttccgacgtgcgtttgctgcgattgccgggcgagcatccgatgatctacgacattacgcgattgcggtatatcgaaaatcggccgctttcgttggaacggtcgcatttgccggcatatctgtttcctctgttccttacacgcgatttgacgaccccgttctacaccatgttcgaacgtgattatggcgtgtatccgtgcaatgtcgacgaaacattggaatcggtggtcggcgacgagcaggagaacgagctgctgcagatcgaggcgggaactccgctgatgcgcattcaccggatcgcctatgcgtcggatggatgcccgttcgagcgtgccactgacgtgtatatcgctgatcgcatgcgattcaccatgcatcattccggctatgtacgcctgtccgcaacgtctacgcagaatatgacgaaataagacggaagattcttcggttatacgatgcggcggtcggcggcccagcgggtgagttcggtgcggtttgacagctgcagtttgcgtagtacggagctgacgtgcgtttccacggttttgatggaaataaacagttccgctgccacttccttgtacgtgtagccgcgcgcgatcaagcgcatgacttcctgctcacggttcgacaagcggtccagctcgtcatcgcggatcggtccgcttgcagagccgcccatgccagccggtgagccattttggaaggcagacagcacgaatcccgccaatttcggcgaaaacacggcatagccctcatatacttgcttgatggaagaaatcaaatcatcgccggaaatcgtctttgtcacatagccttgcgctccggcacgaattaccgatccgacatcctgcggcgaatcagacaccgacagtgccagaaacacggtattaggggagtatgcgcgtgatttcatgagaatttcagctccgccaccgccctcgccgccgggaacatgcacatcaagcagcaccacattcggcttcgtctgcgcgatcatcgccaccgatccctcgacatcggacgcctgcccgacgatgtcgaaatgcggctgcagcgttgcgataacgcccgcacggaacatttcatgatcgtcaacgatggcgatacgtatctgctgttcctgctcgttcattgctgctcctcaaaatggttggtaggttgattgctgaattgattggtacgttgattgttggattgacggttatggtgattgggaaaatcggtttgttgtgagttgctttgcgattcgtgcgattgctgcgcattcgtgtcggcggctgtggttgcgggcatgtctgcgattggcatatgcatgcgcacctccgtgccccattgcggtctcgatacaatctccactgtaccgccacgtcgcttgattcgtccgataatcgattcacgaatgccaaggcgattcgcgggaatcgcattcacgtcaaatccgttgccatggtcgcgtacgaatacttccaccagtttgctgcttgcctcgcagtagacggaaatcggttctcctccatgcgctaccgcattgataagcgcctgttgcgtggcgtcaagcagcgcatcggtttgcgcgcttggacgtgcgtcgcccaccgtcaccacttcgatcggcttgccatgcgtgtcttccacatgtgcggcgatttctttcaagccggcgttcacggaacggtcagacgtggtgcgttcctgatacagccattcgcgcagttcgcgttcctgcgaacgcgccagcgaaaacaccgtctgctgatcgtcggcatgcaactgaatcagcgccaacgtttgcagtacgccatcatgcagatgcgcggtcatgtcggcacgttcctcttcgcgttccttcgatgcgcgttccgtacccaaatcgcgaatcagcgccatgatccatggcacaatcgcaagcaatgcgccaatcagcagtgccaaaccggcgcacagtatgcgaatcatggaaaacgcgtcaaaatgtatgcaggaactgacgtacaaagcgtatgcggcgaaaataatcgcaatgccgccaagcatcgtccataattgaccttcttcggcgttgaaacgcaaccaggagacgccgataccgaccagaccaagcagcaggggcacaatcagagtgcgttcaacaccgcctgcgaacatgacgaaacagatggaaagcagcatcagaccagccaatgcaagcaaagcgggttttggtgctttcttcagtgtctgctcaagactttcgctggaagattgcgtatcgccatgcgttccgtcgttgcgttcagtcgtatcttcaaaagatggtggttgcgtgtgctgaccatcttgcggagctgtaaaagattgatattccggggaaacgggatatgtcccgtacggcatgttgccccgggaaagcggtgcctgccatggcgaacgtttgccggcaataatgtacgtctgctgtatggggtctcccacgggaagtgccatccacaggaaaatgtaagcgatgagccctgaaccgaacagacatgtggtggcgaggaaaaacaggcgcacccatagcacggcaatgcccaaatgcatgctgatcgccttgcatacgccggctcccatgcgtccgtatggaggacgcatcaacggcagtttggccggctgcgtcggcagcggacgtccctcatgcagggcttgatcgcagcagtagcgcatatatacggcgctcgcctggtcgtattggctttgcgtataccacggttttcctaaggatttcatacttctattgtgccttgtaagggacgccgtttcagggcattcatatagtgttcagggcagattcagggtgttccccgatacatgtggcatgcgcgagttgctgtaatggaaccatgagcaatgcaaacaatggtccgctgggcgatcgcggcaacgcagggccgcagccttctgctggacaaccgtatcatcggcagcctgcgtacggttcgccgcaaccttcccgcggcggccgtttcttcacgtggattcgttccagccaggtcaagcgtggacatgaccgttggattggcggcgtgtgcgatggcatagcacgtcgtcttggttggaataccacgttggttcgtgcgcttatggtggctgccacactgtttttcggcgcgggtgccgcgttctatggcctggcgtggtttgtgctgccggatgagcgcgacaatcagattcttgctgaggatttgattaacggcaagtgggattggaattgcattggcgcgctgttgtgctgccttgttgccatctgtttgccgggggcaggatggtttgctttcgcgttggccgcgttggtgctgtggcttctgctcaataggcagatttatgcgccgaatgttcgtccagctcagtggcagcagcccccgtatggtcaggctccgtacggtcaaccgcaatatggtcagcctcaatatggaagtccttcgtacggacagccggtgcctcctgcatcgccgtctccagcgcaatcgaatccttatactcagccgatgcaggcgagcggcgcatataacggggcggtcaatacggcttcaacaccggaatcgcaatcgtcgcagcctcagcgtcctcaacctcagcagcctccatatcatgcctaccaacagcaggtcaatggtccggccgcttttgccacggccaatgttcctccaacattcaccgctccagcagccccggtagcgcagacgcctacgtcgccaagaaggggacgtcgtaaaccggctggtccactgctggtattgatgatgttcggtctcacgatgatcgcatgcgcgctatgcgtatggtgcattatgacgtacggcgttcaaggcgggcagcagggtaccgaatacacgttgcaggcatgcgcggcattcgtcggtggcatctgtctggtgacgggaatcgttattatcgcgctcggattcgcgggcagaagaacgggaggattgcatcctctgacatggatatccatattcatgtcgttggtcatggtgatggctttggcgggttattcgctgctcagctatcggattaacacgggcattcccttatcctacaagagggtcaatgtgtcgggaatgaccaccatgggctccaccgccagtgaaatgagcgaatacgagcagggcatcgtcgcgcaaggcgatgattacgccaccgacgtgctgcatatcgacttaagcgattacgcgaaaaacaacggtccgcacaaagtggatcttcaggatggcacgcagggcacgacttcctgccctacaggaacgttgaatgtggtggcctcaagcgcacaggtcgtggtgaccttgccgaacggctgctggtgggcgttcgggtctgacggtaatttctacaacatcaccgatttcgtcggcagttcggacgggctcacgttggattccggcaatatctatgtctcgcttatgggcaacgattccacgaaatcggtagtgaaaaagcgtgcgctgggaacttacgatcggagttgcggctcgtacggagacgaatccggcatcgaggatttcgatgatgagaccgatacggaagatggcatggataccggcgccgattccactaggaccgattcccccttcaaagacgggaatgtggataaggcctaccgcgaaatctacgacaatcatcaatattggccgtgcttcaccgatgatggcaaggctccggtcatgccaaccggactgcagatcaatactatggcaacggtcggcggcagcgtcgcggtgcagtatgcgtccgacaacacattgggcaaagcgggaaaggagtgaccatgagcgacgacaagacccagggaatgccggtcatggctgatgccggagatatgcctaccgaaacgttgcataccgtggatgcgcagtccacgtatgaccagtcgcagcgcagtgggcgtgcaacgcaggatgataagccgcgcgtggaatccgctccagcgcaaggcgttccgacctataccgcttcggtagccggtgcgaatgatgggcgcaagaatcggcagactggagacgacatcatcagaccttccggaagaagcggttcgaccatcgcgctcggcgtgttcacgtgcttcatgggggtggtgacgctgctttgcggcatgcatgtgccaatgaatctctggtggtgggccagcgatccgaaacagttcttcgtattcctgctcggaggcatcggcgtgctgcttatcgccgtcgccgtgatctgggcgatagtcagcgcggtgcgttcaaaccgatccaagaatggaggcgatgcggacagcgacgatccattcgatgctccccatagttcggatgccacggccttttcgactgattcggataagtcaccgatttcggaacgatcgtgagaatcagctgaatagcccccgatatcagccgcaccaacgaaatcgaggctgacatcgcaaacaaatacgtgaccaccatggcatgaccaaatccaacacttgcttttccatcttgacgttggattttggtcgtaccatggtggtcatttttatggtgatgtacggggcttaccgcagttttcagtaattgtcacggtgtgttttcactgtgtttcactgtgcggcctcagcctgtgccaaatcctcaaatccagccaaacgaaccgtattgcgaatcgtctcttcggtgagattgcgccgctcatgccgcaaacgctccacaaaatcgtggtacaacgccacggtacggtcggaataggtgcccaattcgccgcgcagatacgtttcgaacgacgtggtctctggcgtatcttcgacagtggtcagcacacgcatcgcctcgccgagatgaggaaaacgctcacgaaaatcacgcgcccacgacacctgaactgttatgatgccttcctgcaagacgttgcgattcgcggaaatccggggaatatacggcgcaatgtttgcacaatactcctgtggatatgtggattgcatcatgcgaccatacttttccgtcaccaaattacgtccaacacggtcggcttcctgcaaatccgaccggtaactgcgcagcaattcctccggccacgtcatgaactgactggcacgcatctgatgaaacatcggccaattgccttggcaggatgcgcggccgccctcattattggtttgctgaaactgattccactccagtttgataatggattcaacaagatttgctgtatcgtgaccgtctattacatctgaaattacgctgctattcatatgatttcgattcttgatttcgtctgattattgctctgatttgcaatgcttgcgatggattttttgactgcaggcacgtcacaagctgtgcagacacctcgcgtcggacttgatatggttctcaacatacggccgctgccattccacaaacgtttcgtgggattcggtcaatccctcccgcagcaattcatccacaacatcactgcagatgcgctcaacagtggcgataatgtgctttgccgcaggcttcgcacccttgccgccctcaccgaaaccgacaccaccgaaacatgcggcggaactcaatcgcaatatgtcttccaactgttcgcacacgccggcaagccttgttgccatacggcggctcagcttgcgcatggcagcaaactgccatttgtaatacggcagatacccaacgctcaccggctcattgatcagaaacaccaacgaagccgtggcgttcacgaactcatgaatgctcaacatcgcagcagcaccatcgccacgttgcagcatgcgcggcagattgtattgccccgcctgagccatcatgcccaaacggcgggaaatcaaggaaagtcgaacatcttccggcatgaacttgaacccctgccgagtcttggaaaacatgcccaacggatcagcgaacacctgaccgtttgtggcagtggccaacgtatcttcctgcaaacttagccaagatgcaacatcgttctgcgccggagcctcacgaaacagcgtgatccgctcgaagaaatcgccgatacgaaacacgccatcacggcggaactcgccttgcgcacgcggcgtaagtggcgattgagatgcggcaagagcgtcggaattggccgaaccatgccctgcaaaatgcggcttgccctgctcggcaacagtgaaatcgcgactcaacgcatcgtaatcagcctgcaattgctcgccaatcgcatcataatcctcatcggtaagccacaggcagaaacgcggcgcgaaatcatgatcgcgcgacagctcatcgtcgaaaccgaaacattccgaaccataaccgaccaaacctgcggcaatccgcccctgatatgccgaatatgcgccggcaagcaacggtttgccgagatcattccagaatgcgcgagacaaagcaagtcccgaaatatggtgagaaatcgcaggaagcgaagatgcgccggattccgtcatatagtgcggttcacttgattgctgagattcgattgatttcgatgaatgctgagattccaaggattcttgatattcttgcgattcccgcgttttatgagatgatggcatgtgcttatgcaacgcctgttttgccacttcaagattggctgcagtcgtgtgatagtagtcggtgttgcgtccgtagcattcctcaatcacgttcaacgcatgctcatagctggaaaccgcatcctgcaggcagccggccatatagcaggcctgcgcatagccggccagcgccgaagcataatgcgcactatgttccaaatgcccggtatggtagattgtcaacgctttctgggcgtgctgcatggcgtcgctcgcccaataccggtccatctgcaggagcagcaacgcaagattggtgtgcgtggaggcgacgtcgatgtcagcgctcgcatcgggggaagattgctccaacaggtccagcgcctgttccagctcgcgcttcgcctgatcgagacgaccggtttcgctgtacaacatggacatattgttgtgcagcgcggccaggcgtcggtcggtgggggagaaggcggacgtggccgcgtcaagcgcctgacggtacagctgttcggcctcctcgtactggcctgcggctcgcatgcccgtggccgcgttgatcagcgtcgtagcccacgcctgcgggtcgatttcctgaagatgcaaatgatccgcaatgtttaacgattcgcggataatcggcagattgtcggtatggcgaccttgcgaacggtaaacccccatcgtttcgttcaacaccgtcagcaaaccggcgtcattatgactgtgttcggcttcggtccgcgccttctgcagatacggttcagcctgttcaggagccttatgcgcatcgaaaatcgcatcaagaccacgcaaaaatcgttgtacatcaaatgttgcgcatccgtcatcgcaattatccatattcagattgacatcactgtctgccatcgcaatcccttcatcggtgacttccatcatctcccaaactgcagacggcatcgcagacggcgaaacaacgaaagatggggaacatgcgatacgtcgtacaaagaacaacgggatatctcatcacaataattgtgatgagatatcccgctacataacagaaataatcgaaataactgactgtcgaatgtcagacatgaacttcgcgcatacgctccgtagcacccgtatgcgtttcgtaacggcgtgaataggtgaccagcataatcaccgcgatcaaggcgatcggagcgccggcgagaccggtgtaatggtagttcatgacggtggccgtcaacgctgctccgccaacgatcgaaccgaccgcattgccgaaattgaacgcgatctgcacggccgcgcccgcaatcagctcgccgccgccctcaccggcctgcaccatcagcaactgctgcggagacgagttgaaaaacagggcgaaaccaatcaggaatgtcagcagagcggtggtcacatgattgccaggaacaaagaacaccagcaacaagccaagcgtggcaatggcctgcgaaagcccggcggtggcaccaggcttccacaaatcagtcaaacgaccgcccgcaataccaccgatcaccatgccgaaaccggcaagcaccattaacaggggaaccagcgaagaatcccatccaccgaccttctgcagccacggtgaaacgtagctccaccagcagaaaataccggaattaccgcagaacaccgccatgagaataaaccacggaccggcgtgagtgaggaaacggaactgccccttaatgccagcgtccttaatcggcgcgacgaacggcacccacgcaatcaccaacatcatcgtcatcaacgcccaagcggcaagaatcgcaaacgccaaacgccacgacagcatttccgaaagcaatgtgcccgcaggcacacccaacatattggcaaccgtctgacccgtcaccatcatcgacacggactgcgcttccttgcccttatcggccaacgtcttggcgatcagcgtggccgtgccgaaaaacgcgccatgcggcaagcccgaaatgaaacgagcggccaacaacatgggggaattgaacgaaaccgcgctcaacgtgttgccgaccagtgcgatgatcatgaacagaataatgagattcttcggcggtaccttacggccgaacaccagaatcagcgtgcccacgcacacgccgatcgcatatgcggaaatataatggcctgccgcaggaatgctgacctgcatggcggcggctgtctgaggcaaaatgcccatcatcacgaattcggcggcaccaagaataaaggcgccggaagccaaagccagaatgcttcttttcacagtctctcctccatgaatgtgaagcgtgttggtgtgcgcgcttgtttacgcgcttgtgtattacgtgttttttgatttttcaggtggttgcgtctcgcatatgctgttttgcaccgctgatgcgctggaaataaaaaaggcggaaccgaagttccgccttgagttgtcgggctggcgggatttgaacccgcggcctcttcgtcccgaacgaagcgcgctaccaagctgcgctacagcccgtttggcaacagttgaaaatattacacgattgcttgagtaatgcaaatacggcgtgtcgcgtgtggtgtagtggcttctcggtacactgtgggcttatgagtgagaccatcgaatcgcaagaaaatcagaatgaagaggctgccgttcccgctatgactacggtggagcgcgccgaaatgctgctgcagcaggatgcggctatctacgccaagatcaatgacggcgccaccctggatgaggccgtcgatccgggcaataaggaattcggcccgctggcgcatccggaacaggtgcagatgcgtgtggccaagcgtgccatgatgctcaaggacggtatccagccgtacccggtgaccctcgacgtcaccgccaccatcgaagaggttcgcgccaagtatgacggcaagctcgaagccggagacgaaaccgaagacgtggtcggcatcgccggtcgcgtgctcttcctgcgtaacgccggtggcctgtgcttcgtgcagctttccgctggcgatggcaccaagatccagggcatgatttccaagaaggagattggcgccgattccttgaagcagttcaagcagctggttgacttgggtgatcacctgttcatcaagggtcgtgtgattgcctccaagaccggcgaactgtccgtgttcgccaccgaatgggccattgcagccaaggctctgcagccgctgccggccctgcacaaggacctgaacgaagacactcgtacccgcaagccgtacatcggcatgattgctgacgagaagatgcgcaacatggtgcgcaaccgttccaaggccgttgcttccctgcgcaagaccttcgccgatcacgacttcctcgaggtcgaaaccccgatgttgcagaccgtgcacggcggtgccgccgcacgtccgttcaccacgcatatgaacgcattcgaccttgacctgtatctgcgtatcgcaccggaactgttcctcaagcgctgcctggtcggcggcatcgaccgcgtgttcgagatcaaccgtgacttccgtaacgaaggcgttgacgccacccatgctccggaattcaccatggttgaggcctatcaggcttacggcaactacgacaccatcggcgcgctcgtcaagcagctcgtgcaagacaccgccatggacgtgttcggcacccacaaggtgacgttgctcgacggttccgaatacgatttcggcggcgaatggaagaccatcagcatgtatgattccctttccgaagcgctcggcgaggaaatcgtgccgaatggcggcccggataatccgggtacttccgtggaacatctcggtgccattgccgacaagctcggtgtggaacgcgacgatgtggagaaccacggcaagctcgtcgaacacctgtgggagcacttctacgaagacaagctgttcgagccgaccttcgtgcgtgacttcccggtcgaaacctccccgctggtcaagggccaccgttccaagcccggtgtggtcgagaagtgggatctgtacgtgcgcggcttcgagctggccaccggctactccgagctgaacgatccggttgtgcagcgtgaacgtttcgtggctcaggccaaggatgcgctcgccggcgacgaagaagcctgcgatattgatgaggacttccttgaggctctcggcgtgggcatgcctccggcaggcggcatgggcatgggcatcgaccgactgctgatcgctctgaccggcgccaccatccgcgaaaccatcaccttcccattggtgaagccgctgaattaaggcaaagccttaattcaatatcggcttcacgcgtaaattcaggaaaggccgtctgacttccaacgtcagacggcctttgcgttttaaaagaaatccccggggttcataatattttgcatgagtgacgttccggggcattcgccagtatcatatctcctatttctgggaatgaatgaaggcatgcaatgagcatgattctagaatggcgttcatgggaatgacgatttggatccgtggggcgcggctgaagacgttgccgttggcgattgcgccggtgttgattggtgcgtctctggcttggcatgatgctggcgagcatcgcattgcggtggcggtgttgtgcggtttcgtggcattgctgttgcagatcgcggctaatttcgccaacgattattccgatggcattcgcggtacggatgcggggcgtgcgattgctgacgaacagttatcgcgcggccctgctcgcctcgtggcttccggtgtgaatcccaagaaagtgttggttgcagcgggaatctgcgcgctggctgcctgtctatgtgggttggctgttattgcactaaccggatattggtggttcattctggtcggcatcgcatgcctggcggcctgttggtgctatgtcggcggcaaacacccatacggctaccactatttgggtgagattttcgtattcattttctttggattggttgccacttgtggcaccatgttcgccttgtctggcacgattacgcctgatggactgcttggcggttcagctgcgggattggttgcggttgctgtgctgtgcgtcaacaatctgcgcgacatcgaatctgacggcaatcacggcaaacatacgtggatgactgcaatggggctgcgaaacggcactatcttcactattgcaattctgattatttcagcattgattgcgttgcgtcatctgttgcaatcgtcgatatatgcggcaaacggcattccactaatcgcaattatcgcaatactgtgtgcggcgcaaattgccgcatcatacgcaatcgcaagaaaaacctaccgcagagcattgccgctatgttcgctcgattcgttgactgtcgcagcgattttcgtgctatcgacgatgcttgcataacgtttgcctgacagtagattgcagtggaatgaaaattgttgcataaacgtaactcgaataatcgagaaaacgctcgtttttgggtgtgcgaggcggtagactggcaaacatgacttacaaactagtactgctccgtcatggacagagcgcatggaataaaaccaatcagttcaccggctgggtcgacgtcccgctgaccgagcagggtgtcgaggaagccaagaatggcggtcgtctgctcaaggagaagaatgtccttccggatattgtcttcacctcgatgctgcgtcgcgccatcaacaccgccaacgtggctctggatgaggcggatcgtctgtggattccggttcagcgcagctggcgtctgaacgagcgtcactacggcgctctgcagggcaagaacaagaccgagatccgtcaggagtacggtgacgagaagttcatgctgtggcgccgttcctacgccactccgccgccggagatcgatccgaacgacgagtatgcgcagaacaacgatccgcgctacaccggcgatccggttccggaagccgaatgccttgccgacgtggtcaagcgcgttgagccgtatttcaagtccgacatcgagccggagctgaaggctggcaagaccgttctgatcgccgctcacggcaactccctgcgcgccatcgtgaagatgctcgacaacctctccgaagaggagatcgccaaggtcaacatcccgaccgcaatgccgctgctgtacgagctggacgagaactttaagccgatcaagccgcgtggcgagtatctggatccggaagccgccgctgctggtgccgccgctgtcgccgcccagggccagaagtgagtttgttgcgattgatacgcaggtaatcgcgttcaatcgtacggaacgtatatgaaaaggtggaaatccacagtatgtgggtttccacctttttgcgtccggtatctttgttgggttattacgtccgtctgccggatggaatacggaacatgggatgtgcggcagacggacgtcaatcgcaatcggctcagatcacgccgtattccttaagtaacatcggaatatcggtggaatcgagcttcttcagaatctgtttcaacacggtcttttcaatggggttgagtttcatgtcggtaatcggcttgccgtcacgcagcattaccgtggcgttgagcaggttgcgtacgtcgtagaccgaaccccacacttccggcacgccacggtccacatcgcacaaggtgtacaccgcttccatgccggtgcgcatcgaatattcggtggtgaagatcgtgtcgcgcggggtttcggcgaactgaccgaggaaagcgaagttcaccgcgccgtccggcaccacatcgggacggtctccggcggaacgaggcatgaagaacgcgtcgatgtatggcatcatcaccggcacggtgtttgcatggttcgtggcgagatccttgatcttgtcggtcggtacgcccatgtggtagagccattcctcgcagatttcctcgccggtgcattcccgcatcggcttcttcacatagttgccgggcttgtcggggaacaggccgtacacccacacgcacagctggtctttcggctggtcgcggaactgctgctggcggttcaacgtccagctcatcagccagttggaatcctccacggtgacgatgccgccggtcaccacatggccggtgaacgggtcacgcttgcagatcttctgaatatacggcggaatttccatgtcaagcgtggtcacggtggcgctcatccacttcgaatgctccggatcgccgcagaacacgtccgggtgaccgaaacttgggtcttgcttggcgatgcgacgccacatgtcccagccgccgccgggcttgatttccggagcccatgcggccgcttcggtttgcgagcccatggtcgagttttccacgcagccaccattggtgatgaacaccaagtcgttttcgcccaaatcaatgcttcgcgcggtgccattcgcttcggtcaggtcgatgcgcgtagccattttcttggttggcgaactgtacggattgcgtacgaacacgccggattcagcctgtttcttcaaaatcgtgtcttgaccggtgccggtatgctgccgaactggacccatgcctccgccgatcttgaaatcgacgttctccactttcacgttgtagtggaactgcacgccgaatccttccaaatatgtgagcatcggaagaatcatcgactcatactggttgtagcgggtgaaacgcaacgcactgaagtccggcaatccgccaatatgatgaatatatcgacggatatacagcttcatttccaacgcactatgccaattttcgaaagcgaacatagtgcgccagtacatccagaaattcgaattgaagatttcatcgtcgaaataatcggaaattttcttgccgtacagttcctcgttcggcgtgaagaacaattgcatgatctccatcgaagctttgtccgacagattgaatttgccgttcgtgcctgcgtcgacgccgcgggctttcgtggagcggcagagcgagaagttgggatcttccttgttcagccagtaatactcgtcaagtacggaaacgccttccgtttcaatggatggaatggaacggaacatgtcccacatcacttcgaagtggttgtccatttcgcggccgccgcgcattacgtagccgacgccgggaatgttcgcgccatcgcaggcacctcctggaaccgcgtccttttcgaatacgtgaatgtggttgcctggcatttgcgcgtctcgtaccagatagcatgccgcagtgagcgcggccaagccggtgccgatgatgtacgcgtttttgtcgtccacgccttcgggcttcttcggtcgggcgaatgcttcgtaattgccgttggaataatacatgactacctcctttggatgtcactgcacatattgtgccgcgacattacgtaaaaatatatgggcaaaaaatagacatgttgcataatttttcccatggcttgacgaaaaggacatacggatgacaggagcttgccgaatatgacgtcgaatacgccgaatacttgcgaaagatatacaaagaaggcggcttccgtgagtgaaacggaagccgccttcttaaggaagatggaaaagaagatcgcaagaaaaaaatcaggcgatgtcggtgtcttcgtcgcgggtcggctccttggacgggtcgaaaccggagacgatgtacaccacgcggcgagccgcggacacggcgtgatcgccaagacgctccatgaagcggccgatcagcaccacgtcgatgagctgctggttggtgccggaccaatccgcggactgagccagttcaaaggtcttcttgtgcagttcgtcgagcttgtcatcgttgataatgatctgttcggcggtcttggtgtcgcggtcagacagcatggccacggtctggtcggcgacgtcgttcaggaacgcctgcatttcggcgaacagcggttgggcttcggccggcagcggggaagccgggtaggtgcggcgggcggcttcggcgatgtgacgggccagatcgcccatgcgttcgaaggtggtggccaaacgcatggtggaaacaaccacgcgcagatcggtggcaaccgggttctgcttggccagcagcttcacgcactggtcgacaacgctggcttcgagggcatcgatttcgatgtcgccgtcgataacggcctgggcggcttcaagattctggttcagcagcgcgtcgccggcaccgttgatcgccttgcgcacgcctttgaccatgtggtcgagatcatcggcaacagccttgagctcctcgttgaaaataacgcgcatgtgacttgcctttcaatgcttcatatatatctgggttcgatataacctctcacaagtctattagacaaacgccatattcgtaaccactgctcgtgttgttccgtcaaagttcaccaacgcgttcaccttgtgttcacgaacgagcggtggtgtcgcgagttggggagcctcaagagtgtgcaacaatgaaaccatggttgaatctttgggttcgtggtggcgttcgctgacgcaccgcaacgacgatgatgagcatgatgccgatgacgacacattggatgatgccaccaatgcgttgctttccatgctgccgttggcatccgtcgtagttgacgagcatgacgaagtgattcgcgcgcacccgtcggcgtatgcgcttggcgtggtgcgcgatgatgccatcgcggaagagaccgtgcttcgcgcagtgcatgaggtgcgttcctgtggcggcaacaaacaatttgatttgaccaccaccacccaatatgtcgcccagcaagtgccgaaggcaggcaaaccaaccacacgtgaaatcgcgcgccaggcactgatagggcagtcaaaacccaatacttccggcgcaaccgtttcccgacccaactggctgaaaatcatcgtcggtaaactcaatgagaatctcatggttgtgctcatcagcgatgtgagcgaaagcgtacgattctcgcaggtgcgcgattcgttcatcaccaacgtttccgaacaattgcttgagccgacgcaatcattggaacagctggcggacattgtggaacggggcggtgccagccaacaggacgtcgaacgcaacgccacgcagctgcgtcaatcctgttcccgtcttgagcatatgatttccgatctgctgctgctgatcaaagcgcaggagccaatcctgccgaccgccgacaatcgcatcaacgtgatggaacaggtacaagccgtggtgcaggcgcatctcgatatggctgcgcaacgcggcatcaccatcgagaccggcggtgacgaatcgctatgcatcaatggcgaagccgatcagattcaggcggcgctcgcaaaattgattgaaaacgcgattacgtattcaaaagacggttctacggtgaatgtcgtcgccaaagccaatgaggagcatacggaagcggtaatcagtgttctcgatcgaggcaacggcatcgccatcggcgaacagaaccgtatttttgaacggttctatcgcggcagcaatcagaatgagcattccggtgacggcattggtttgggacttgcgattgtcaagcatgttgcgttgacccaccatggttccgcgtcggtgtggagcagcccggggcagggaagcacgttcgccttggtgctgccgttgggcggggaatgatgtaagacattcggcagatgttgcaaatatctcaaatggagataatgcgatgcccgtctcgtttccgataaggcgagacgggcatcatatttttttgaggatttttcgggggtatattgccgattactcgccaagacggcgataatcccaacggtcgaaatgctcccaaaccagcatgagcacgccgatgaccgtacccgcttcgcagacggtttgcgcgcgttccgcgtcgatgccgaatgcgataagtacgatgcagaccaccaaagcgatggcccatagcgcggtgccaaacatgaataccttgcgtaggtcgacgcgcaccggtttcggcgaaggtttcctcacgctgggatcaataatcggagcaatcttcatatcgccacaccttaccttgcatcagagatgttccaccacgtagtcgatacagcgggtgagcgcatccacatcgctgggttccacggacgggaacacgccgatgcgaagctggtttcggccgagtttacggtatccgttggtgtccacaatgccgttttcgcgcaatgccgccaccacttgggatgcattgatgccatcgttgatatcgatggtgaccacggcgttggagcgcgcgttcctgtcgtttacgaacggggaggcgtaatcggacttctccgcccactggtacagcagggacgcagaccttgcgcagcgggccgaagcccaggcgagcccaccgttgtcgttgagccaacgaacctggttttccagcatgatcagcgttgccactgccggcgtgttgagcgtctgatccttgagggaattctcgatggccgaagtcagggaaaggaacggaggaatccagcggcgtgcgcccggaagatccacgcttttggcgatgccgtaggcgcgttcgattgcagcgggggagagtacggcaatccatagtccgccatcggatccgaaagctttttgcggcgagaaatagtaggcgtcggtctggctgatgtcgaccggcagcgcgccggcgccactggtggcgtcgatcaacgtgagcgcaccctgctccttggtgcctgcgatgcgtttgatcggtgcggcaacgccggtggaagtctcattgtgggcccagcaataagtgtccacgtattccgtgagctcaggcaggcgatatgttcccggctctcctgcgaaaatctccggctcctcaaggaacggtgcggattgcgctgacttggcgaacttcgagctgaatgagccgtacgtgccgaatgcggccttgcgggtgatcagcgaggcgcaggcgatatcccagaacgcgctggctccgccgttgcccagcaccacttcgtagccatcgggaatctggaagaattcggacagtccttcgcggattgagccgaccacctgcttgatgggggtctgtcgatgggaggttcccagaagattacgggctcccttatcgagcgcttggatttgctccgggcggattttggtcggccctgagccgaaacgtccgtcttccggaagcacgttggaaggaatggtcacagtgttcgtcatgacaacctagggtagtcagatggtcggattgtgcgtggtgatgaccgcttttcggaaccatgacgtggcgatgatgactgcgatatcccggtgtcggtgtagcctgagcttccgtgacggttctgtaaccacgcggtcataagcctgctgtggttgaagtaatccgcaaggagtgttgatatatgaggcatgcggcgcataaagctgccaaggtttcgaatgagcgtttcagcgttgccaaggcgctgttcacctcgagccgcggttcccacaccgccaaggccgttcgtatggtccagctggcaaatggtgggggtgccgttgtaggtcttgagcctgcggttgccgaaaagctgaatgaagtggctccgatgagccgccgcgccatgcgtgaagccgctcgtgcggccggtcgtcgctccgcattcatggcttccgcatcgctggccgcgctggtcggcaccgcggccactgccatggcggtcggccagcagaatgcgtctgaaatgacttttgccgacaatgccgccactaccacgcagatgaagcgtgtctccgacgatgcggcatcccgttccgagtcccgtagcgatctagacgctctggcctccaccagcaatagcggtgattggcagcttggcgaaaccagttcctccatggacacgaatcttctgtcaaagtccattgccgacaatcccaatgtcgccgttctcatggatcaggacgccggtcttcttccttcgggcttcaatccgaaccacggcaccggtgataccggcaatgactatccatacggtcagtgcacatggtgggcgtatacccgtcgtgcacagcttggcctgcctgccggaagccattttggtgatgcgcggagttggggtgattccgctcgcgctctcggctattgggttgacaatacggcacgtcacgttggcgatattgtggtattcgctccaggccaaatgggcgcggacagctattacgggcatgtcgcgattgtcgaaggagtgaatgccgacggttcgattaagatttcggaatccaacgtcaagggtcttggcgtgatttccgatcgtacgttcactgcgcaggaagcttcgcagttgacatatatccattactgatttctctgttttcgttaatctgcgcttgccgtcacttttttggcgtagcgtgattgcgtcggcgtgtcgcgtgatatgacactgttctggttatcttgctgttctgctgcgggggaacgtgtatggtagcttcagacacgatgaatattgctaaacgtttcacgagtatcttcgccgttgttgctgtatctgccttgttgggtgcggcggttcccgccgcaagcgcaggcggtgctatggctgataccacggtaaccgctacacgttctttcccgaagaccaccgcggccaagcgtgattttctcgccgagcacacatccacggatgttgaatctaacgccgattggggtggcatcgaaagcttggatgttccccagaccgagtctcaggcggaaaaggaccagaaggctcaggagcaggctgaggccgaagctcaagcacaggcggtccaagctcaggcacaggctgaatctcaggctgccagtcgttcttccgatcgtgcttccatcagcgttcctacggctcccgcgagtgccactgggcaggctctggccgactacgctctgcagttccaaggttatccttacgtggccggaggcaatactccgtccggctgggattgctctggtttcgtacagtgggtgttcgcccagttcggggtaagcctgccgcattattctggtgcccagatgagcgttggaacggcagttggaagcattgccgaagcagctcctggggatatcatcgtcaatactcagcatgccgcgatctatattggcaacggcatggtgatcaacgcgctgaatccggctcagggaacgcaggtcacttcgctggccgtgttctcaggtggctatgcgattcgtcgtgtgctctgagtgaacatacggtttgatttttttaaggcgtatcctttcggggatacgcctttttgtatggaaaagaccgagtcgttactgacaaaaccgcatgtcgcgcggtatggtggagcctagaggcgacgcatggtcgcgttgccgaggtgattcaaggaggtcgtccatgattaacgacaaggcaatcctcgttggtgttgatggatcccacgccagctataaggccacttggtgggctgcgaactatgcgaagcatgcgggactgacgctgcagatcgtatgcgcatactcgttgccgagctatgccgctgtttccttcgacgcgacatacaccgccatgggggatgacaatgcggcccatagcgacgcgcaggagattctttcgaaggccaaggccatcgccgacgagcagggtgttgaggctaccacgcttattgttacgggcgatccggcttccgtattcgtggaactgtctcgtaactacaatctcatcgtcatcggcaatcgcggcaaaggcggtctggcggaacgtctgctgggcacgaccagctccagtttgccggcgtatgcatactgcccgatcgtagtggtgccgtacactgacgatgacggcaatctgatgcacttgaacaacaccatcaccaaggtggccgtcggctccgacgaatccaagtggggtttgaaggcgctggagatcgcggcgaatttcgccgccgcatgggatgccgagctggatgttatttccgcggtgccgaacatgaagggttccgacgacgaaggtgtgatggcctcgttcaaggatgatctggaagtgcgtatcaagccgcttgaggaagcccatccggatttgaagatcaacaagcagatcgtgcctggcccggcggttggcgcgctgaccaaggccagctatgatcacgacgtcgtcgtggtcggttcccgtggtcgcggcggcttcactggcctgctgctcggctccaccagccagggcttgctgcagcacgcggtcggcccggtgtatgtggtgccccgcaagtatgtcgaggctgcggaaacccgtcttgacacggttccgagctcgccggcggaagtcaagccgaaggctcttgccgatatcaagggtgtcgaggaggtgccggtttccaaggccgagccggatgtggtcgaagccatcgaaaccaagatcgatcccgatcgtcagtaaattcaacaggtacatataaaaaggcgattgcaacactgcgaaaagcgttgcaatcgcctttttttttaaaaaaaagaaaacgtcagtgcttgatggtgacgtccatgcggaccggagtcttctccacgtacgtatgcttcaccgtgcagcccttgtcgatatgacgagtgacgcgttccttaagctttgccgcatcctcatcgctcagaccggcgtcggtggcgtcgatgaccacctgttcgtcgaaaccgatgtatgcgtcattgtcggcgtcataggtgccgtccacaacgattttcgcgcccttgccctcgcccagcgtatgctcgatggcgaactggcttgacagtgcggcgcaaccggccagcgcgatcttcatcaggtcgcccggcgtgaactgtccacgacccttgccgaacttgatatgcgcgccatcctcgccgaaagcatcccaagaaccgtctttgttacgctcgacccacagtcttttgcccatggtgaactcctcatcgtcttgccgggagcgccgttcgctcctcgcctacatacctaatgtaatccattgatgcctgttcgctaggaggcattccgaaaagcgtaaacaatcaacgcgcgggtggcatatgcttgacctgccgttctgtactgttaagcttgcaaccatggctttgacacctgaacaacttgcagatatccgtacccgtattccggcacgcccggaaactgacattcccatgccatatgaagaccttgtgcgcaagatcctgacggaaggcacgttgaagtccgatcgtacgggcactggtaccgtcagcctgttcggccagcagatgcgattcgatctgagcgagtattttccgctgctcacgacgaagacggtgtttttcaagggacttgcctatgagctgctatggttcctgaaaggttccacgaacgtgcgttggctgcaggagcgcaatgtgcatatttgggacgaatgggccgatgagaacggcgatttgggtcccgtatacggcgcgcagtggcgtagctggccggcgcccacgcccgatgatccgaaccgtaccatcgatcagatcagcaatgtgcttgatcttgtcgagaatcacccggattctcgtcgtatggtcgtgtccgcttggaatcctgccgaagtggagaatatggcgttgccgccatgccacgcgctcttccagttctacgtggcggatggcaaactttcgtgccagctatatcagcgttcctgcgacatgttcctcggcgtaccgttcaatatcgcatcctattcgctgttgacgttgatgatcgctcagcaggcgggactgcagccgggggagttcgtgtggacgggtggcgactgccacgtgtacgacaatcacatcgaccaggtgttggagcagttgagccgcgatccatacccgtatccgcagatccgtattaacaaagccgattcgctgttcgattacgattacagtgattttgaaatcgtcggctaccagcaccatccaaccatcaaggcgccggtggcggtctgagagtcgtcgccagacgttagactattgaccctagttcgactgcaaggagtgagtgaaatggagcatgacagtagccgcagtggctatcacgaacccgagcccggacttgccgggcttgaggacgaggaggattggggcgatgatttccccaagacgttctcggtgaatctgatttgggcgcaggcctgtgacaaggaaggtcatgacggcgccatcggattcgagggtggcatgccatggcatctgcccgaggatatgaggcgtttcaaggagcttaccgtctcgcatccggtcattatggggcgtaagacgtgggagtccctgagcccgaagtatcgtccgctgccgaatcgcgacaatatcgtggtttcgcgtgatccggcttacactgcgccgggagcgaccgtggtcgacagtctggatgatgcgcttgatctggcacgacaggaagccattccggatgacggtcttgaccgcagcgaaatctggattatcggtggcggccagctgttccgcgaggccatgccatttgcggacaaggcgtatgtgacgcagatcagcatgcatgccgatgccgatacctacgcgcccgacgtgaagtcgctggtggaatccggcgcttggaaggtgcttgaagagggcgtgtggcagaacacgcggaagggttccggagatatcgccggattccgtttcatgacgtatgcgaagaatcgcgaggagtaaccgtatgtataccgtgatgaccgtgtgtaccggcaatatctgccgttctcccatggccgaaatcattctgcgcactgaattcgagcgtcgtggccttgccgacaaggtcaacgtcgagtccagtggcgtgagcgacgaagagtatggcaatccgatcgatcgtcgtgccgtcaaggtgctccgtgagcgtggatatgagctgccggcacatcatttcgcccatcgcatcacccgcgatgagatcgagcgtaccgacctgtttctgccgatgaccgcttcgcatatgcgtgcgctactgcgtcagctgccgcaagccaagcgtgagaacgtgcatatgtaccgtagtttcgatccgaatcttgccaagcctgtcgcaggctatgaaagtgagattgatttggtcgatccttggtatggcggcgcccgcgaattcgaagtggcgattgaccagattgaggaagtggccccgttcatcgttgattgggttgagcggcagctctgacgattgcatacgatttttccgtcgaaaagcccggttcgcaagagccgggctttcttgtatccgtatgatttcaatgatttcgaaagatcttaagaaatcgcaagagattgcaaaagtaatattgcgcaattgatgcaaatcagagaaaaatagaaatgaaaaataaaaaagcgaccccggccggacttgaaccggtgacctccgccgtgacagggcggcgctctaaccaactgagctacggggccgttgtttcagccttgcgactggcaacagatagatatattacggcaaagtcgctatcgtgcaaatttcggcgtgtcatcgatgaatattcgtatgaattgctgaaagaaagtatttgcttaaactgcggcagtagtagggaagaaaagcaacggccggtcgcatatgaggggaaaacttctcatatgcgaccggccgttaccgttgcggtgccgtgttgtcgctcacgacactacgaattgctggtggaatcagtcggtctgtttccaggtctcgacgtcgatgtggtgttccggattggcctgccatgcatcccaagcggacttcacgatgtcttcgacgttgtactgtgcgtgccagcccatctcttcgttgatgcgcttcggggagccgatcaggtgcggcggatcgcctgcgcgacgggccatgacggtctcttcgaacggcaggccggtgaccttcttgacctcatcgacgatctgacgcacggaggtgccttcgccggtgccgacgttgaaggcgtcgtacttgcgttcatcgcggtccagatacttcagggcggcgatgtgggcgtcggccagatcggagacgtggatgtagtcgcgcacgcaggtgccatccggagtcgggtagtcgtcgccgaagatcgcaggggccttgcccttcttcagacggtcgaacagcatcgggatgaggttcaggattgccggatcctcaagctcgaccgggccgcagccggccacgttgaaatagcgcaggccgcagaagcgaatgccgtacggctcttcgcaggcgcgtgccatccactcgccgaacagcttggtctggccgtacgggttgatcggcagcatcggaacgacgtcttccggaaccacgtcgaccggcggaacgccgtaggtggctgcggaagaggagaagacgagcttcttggcgccggagtcgcgcatgccgatgagcacgttgagcatgccgttgatgttctgctggtagtaccacagcggcttttcaacggattcgccgacctgcttgcgggctgcgaagtggatgacggaatcgacgccttcggccttcatgatttcggcgaggcgttcgccggcacccggtgcggcgatatccatgccgtacaggcgggagccttcgatgcgggttggcttgccgtagctcagatcgtcaacgacgacgacctgttcgccggcctggtgaagagcgtggacgacgtgagcgccgatgtagccgcacccaccagtgacgagaactgtcatgttctgtcctttcctccaaaatgagcgttaaagcgttttggttcgaaaaacaaacgtccaacgaacgttgttcacttttgctctagtttgttaccttttgaacaatttgagtataacacatgaacaggaacgcacataatcgaccctttcctgcgtttcctctataaattagggtatgcaagaagatgtgaacacgccgactgaaaatcaagttaacggcgaaaacggacaaaacatgtcaaaaacgcaagatgaacaacgggctgatgctggccagcgtcctgccttgtatgggcgcaaggtgttgtccttcgtgcgtcgttccgccaggctcgacgcacgcttgcagcgtgcatgggatgcctatgcagatacgtatctgctgaaaatcaacgcgggcgaggggtctcttgatgtgcgaggcgatctggtgttcgatcgggcgtatatcgcggatgtgtggggcaatgtcaatcctctgattgtggaaatcggtaccggccagggggaaaacgttgttgcggccgctgctgaacaccccgatatgaacttcctggcgcttgaggtctacgatccgggcgtggcgcataccatgctgctcgcaggcaagcagggcctgaccaatctgcgcatcgcgcaggtcaacgctcctgagctcttcaaagccgcggcggatggatcgatcgctgaagtatggaccttcttccctgatccgtggcccaagatgcgccaccacaagcgtcgtatcgtgcagccggagcttgccggcgagattcatcgcacgttgcgggatgggggaatgtggcgtatcgccaccgacatcgaagactatgcattgcatgtgcatgaggtgatggatggtcttgaaggattccataatgacggcatgcttacggtgagtttgccggtcgagcatgttggcaagggaaatgccgacgaagcggccggtctgcgacacgccgatttcaccgaatccgagcgtttttccggacgaattctcacgaattttgagaaaaaaggacttgctgccggtcgtgtgattcatgacctcacctatcgctgcgtatagtgccggttggtctgttgttgaagtgctgaaatggcttgatttcaacgattttcagcactttggcaacgggttgatggcgattttgcgacgctgcgacacgccgagatttgcatgttctgaggattcgcgtatagttaagcgagttgtcacgcggaaacgctgaaagcgcccccttcgtctaacggttaggacaccagactttcaatctgacaacgagagttcgactctctcagggggtacttaccttggtaacaaggtggcaatggccccgtagctcagttggttagagcgccgccctgtcacggcggaggtcaccggttcaagtccggccggggtcgctcgaacagattcctgttcatggctctgtagctcagttggtagagcgaacgactgaaaatcgttaggtcagcggatcgatgccgctcggagccaccatggctttgaaacctcggaaacatccgaggtttctttgtttttgcccacacgtatgacgattgcggccgtatgtctagcgccaagccactgatgccggctgttggttgaatacgcgctcgcattgcgggtaagccccctaaaatggtcgacgcaagtcatgttgacttgcgagttactgagaaatgactaagaaaacctccgttagagggggaatctgtctgctgtttggctacactggaacaccgtaaggcagtaacaatgggggtttgtgggcagagttatgccgtaaccccgttaagggagtattcgctggggtggcggcatggaagtgcttctggtcggcaacaccgacttcattaccaagcagtggattcagcattcctttccccgagaccatgtggtgatagcggaacgagaaggcaccgtagacggcaatgaccgtctcagaatcgtcaacatgtctgacgccaacacccttgccgaaactcttaccacatacgaattcgatcgcatcgtattcttttccgaaggcctcaccccgcgaagtgagcgtgacggcgatctcggatatcttcgcagattgctgcacgccatacgtaacagatccacgcaaatgctgatggtatgcggaccggaatccgaattcacctatccggaaaacgccgacgtacgtgataccagcaaaagtctgatgtctcgagcgtcggaagaactctgcctgtattacgcgcgcacctaccgtctggaagcgaaaatcattcgctgtccatacttgtatgcacccgagcgcaatggagcaaccgcatatttcggtagactgttcgaacaggcatcggcagggtcgatctcattctgcgaacgcaaacagcaacagacatgctttctctgcgccgacgatcttgccgaactgatctaccgcatgttcgacgattggaccgccgaaagcgaaatcttccatgtgcccaacgcgtttgactcgacatacggtgatttggctgaggcgagttctagtggtcgtcgcaacactttgaggaatcggaggttgcggcgatgggctacgagttcgaggggtcgtgcacgaacggctgcgtgacatgcaggccgcaaggcgagcccgctatgcggagctgctgaaggcgggcatgaacttcacgcaggccgcgcacgcggtcggcgtctccaagcgcacgggcaaggtgtggcgcaacgggctcacccgttcgaccgggcgtaacgaggggccactggttgattggtacgctggccgcatgggaccagaacgagacaggcaggcgggcacgcggcgccatctgagcgaggacgagcgcatcgagatcgccgacctggtgcaggccggcgagggcgtgcgcgccatcgcacgcaggctggggcgaagcccctcgaccatcagccgcgagcttcggcgaaacgcccacccgcatgacagcgtctaccggccccggcgcgcccaccagatcgcccggtcgagaaggccgcggcccaaggaacgcaagatccgacccggcaccgcgctctacgactacgtggccgcagggctcagacgccactggagccccgagcagatcagccggcgcatgctcctcgacttccctgataatgaggccatgagagcatgtcacgaaaccatctaccaagccatctacgtgcaaggcaggggcgaactgcgcaaggacctcgccaaggcgctacgcaagggacgcgcggccagacggcccagaaacgacggtcagtgccgccggccgcgcttccgcgagccgatggtcatgatcagcgaacggcccgccgacgtcgccgaccgggcggtcccgggccattgggagggcgacctgatctgcgggaccgccaacaggagcgccatcggcacgctcgtggaacgcgcaacccgctacacgatcctgctcgccctgcccgacggccacgacgccgaacacgtgcagcaggccatcatcgacaagatgggacggctgccaaggccgttgctcaactcgctgacctgggaccagggcgccgagctcgccctgcaccgcaggatcaccgccgcactggacatgcaggtctacttctgcgacccgcgcagcccatggcagcgcggcaccaatgagaacaccaacggcctgctgcgccaatacttccccaagggcacagacctttccggatacagccaggactacctcgacgccgtcgccgacgaactcaacgacaggccgagaaaaccctcgactgggccaaacccgccgaaagaatcatcgagctgttcaacaccatgcaatacgctcaataaagcaaacaatcacaacgacatgttgcaacaaccactagaatccgcccttcggggacgacagaatctaccgcatcggaggcgatgagttcgtgattgtcagctgcaaccatacggtgagccaaagtatgcgtcggatggcgcgtatgcgtcgggattttctggaaggtgattgggatatatccgtaggcatggccgaatccgatgatggaggggatcttccggacctcatcaatcaggcggaaatccgtatgcgtcaggacaagaaacagtattacgtcaatggcggaggcaaacgtcagctccgcatgctcaacaaccagcttgagaatattttggtgcgtaatgaggatatgaaagcgctgcttgaacatctgaatgtacgttatccggtgtcatttatagtcaatctgaatatcgatacgcagcgttcgatcatggtgcccgatttctttcagcgtatgcttgatgatcatgacggttccttccgcgaagcattacgtgagtattgctgtgtgatgattgcttccgaatatcaagaaggtctcctgcgactgcttgactacgatgttgtccgtagccggctcaagtcggaaggtgtcgtgcaatgcggttacgtgaagaacgacggtgagcggttcatgttgacgattcttaccgacaacagatccatggacgataccatgtgggtgttcgaacgtaaggacctgctgtagcagaaggacaggttgttcgatggatgtttttaccccctatctggttttattatgtgagaatggttacataatgtcgcggtgtcgttgatcgcataacagttgaaaatgggtttatgatgggagcgttggcttcggcaaggtatgacgaagcctatgaacgcacagtagcttaaaggagagcatactatggtctatcgcatgattttcaaccagacggcgtatttcggtcgcggagccatcaaggagattccgggcgttgccaagtcgcacggcttcaccaaggcattcatcgtcaccgatccggtgctgctggaaaccggtaccgtcaagaaggtcaccgatgtgctcgatgaggcaggcatgccgtacgaggtcttcgacaacgtcaagccgaacccgccggtcgaatgcattcaggacggtgtcgccaagttcgccgcatccggtgctgatttcctgatcggtctgggcggcggctccccgcaagacacctgcaagggcatcggcatcatcaccgccaacccggaattctccgatgtgctctccctggaaggcgttgccgacaccaagaacccgtccgtgccgatcttcggcgtgccgaccaccgcaggcaccgcttcggaaaccaccatcaactatgtggtcaccgataccgccaacaagcgcaagttcgtggccgtcgacccgcacgacattccgatcgtcgccttcgtcgatcctgatctgaccgactccatgccgcgcggcctcaaggtcgccaccggtcttgacgccctgacccacgccattgaaggctacatcactccgggcgcctggagcctgtccgactgcctgagcatgcagaccatccgcatgattgccaagaaccttgccaagagcgctgacggcgacgttcctgcaggcgagcagatggcctacgcctcctacatcaccggcatggcctactccaacgtcggcctcggtctggtgcatggcatggcccacccgctgggcggccgcctcggcgttgcccacggcgttgccaacggcattctgctggcaccggtcatggaatacaacaaggacttcaccggcgagaagtatcgcgacatcgccgacgccttcggtgtcgaagatgcctacaccggcgatctcgagacggttcgcgaagaagccgtccaggccgtgcacaagctcaccgtcgacctgaagaacccgaccaccatctccgaagtcggcgcaaccgaagccgatctggaagcactggcccacgacgccttcaacgacgtgtgcaccccgggcaacccgcgtcaggccaccgaagaagacatcctcgccatctacaagagcctgatgtaatgcgaaaactctcacgaatcggcaatcgcatgcagcgaatctgcagtgaaacccgattgtgagagaacatcgctgaaagcattaaaaatcgtggtgcgaaacttcacaaagcattcgcaccacgatttttatatctgcacataaattacggattaatcgaaataatgtaaacaataatccgtgattatcaatcgcaagtattggaattactcgtgcttttcgctccactcctcatcggtgggagtgtcatcgtaccattcgcggccttcctgctcggccaattccatctgctcgttgatccacgccgcctccgcaggattgatatcggcggtgtcaagcaccttctgccataccggatacagcagatgcatcaccggatatagcgcggtgagcagaatctccggcttatgtttgcgcgaatgctgtggatgcgcgtcgaacgtgttcttgaaacgacgcatgtaattgttgaacgacgtgagcgacgtgtccatacggcgggcgctgatgccggcgatcatacgcgggcagtacacggttttcagatccttgcccagcagatgcagcgaaatatcgatatcctcatgcatcacatcggccttgtctcggcacacttcgtcagaaatttcgcgccaagctgaagcgcggaccgccatattcgagccaaacagcaacggctggccgccatcggccttgtaaatacgcttgcgtgtggaattatccccacgcaaaccaaaatggcggctcggcagatcgtaatacatcaccggaccagtggcacccatggcctccgggtcctcagtgaaaatgccggacaccacttcgacccaatccgggcgaatcatgcaatcggcgtcgaaacggcccagaatgtcgccggtggcgtggttcaaaccataatcgcgcgtcggaatcagcccctgctcctcatcctgatgcagcagacggacgggtgcttccgggtggtctttgatgaactgctccaccatggccaccgtcgaatcggtggaacgattgtcgacaacgatcacttcatggggcatcacggtctgcctggtggcattcaacaggcaatcgttgatacgctcctcttcattccaagcggggatgacaattgaaacgttcagcataactaccacaatagctcagcctgtacacgacgcctatcgctacaatagggagccatgagcgacagcgaacagcgaatgaacaatacgcagagcgaaaacggtgcgaacaccagcgaacagcgatgggacctcggcaccctgtttccagccaaaggagatccccgaaaaccaccggaatggctgggacgtgcgctgctatacatcgccatagccattgtggggtttactttctgctggcgcagctggggcaaaatcgaatacctggtgatcgacatcatcgtctcgctgttcatcgcgctcgcggtggagccggtggtggtgccgctggtcaagcatggctggaaacgttcgttcgcgtcgctgttctcgctgctgatgctggccgtgatgctcggcgtgctgttcacactgttcggcaacctgttcgtgcagcagatgatcgccttggtgaacggtctgcccgacctgtatgagcagatgtgccagttcgccagtcaatacgcgaatttccagcttcctgagatcaataatctcggcaatgagattctgaagaacattcaaacgtcgtgggtcactgatttcgcgggtaccgcgctgaatacggtgtcgggattgttttcgttcctgattaacctcatgacgataatcatgaccacgtattacatttcagcggctggtccgaaactgcgtcgtgccgcatgccagtggatggctccggcggctcagcggcgattcctgttcgtatggacggtgagccagagccagatctcgtcgttcctgttctcccgcgccattctcgcgttgctgaacgcgttcttcacaggaatctgtctgatgctgctgcacgtgccctattggctaccgttggcgctgttctgcggtgtggtttcgcagttcattcctatgttgggtacgtatatcggcggcgcgttgccagtgctgttcgcatggggtagctgcggattgtggcaggccgtggcggtgctggtgtttatctgcgtgtatcagcagatcgagaatctgattttcgcgccgaagatctcccagcgcaccatggatgtgaacgatgccgtggcgttcctcgcggtgctggcgttcacctcgctgttcggcgcgttgggcgcgttcctcgcattgccggtggttgcatccgtgcagacgatcttccgcacctatacaaagcggtacgagctggtcgattccccgctgatggacgatccggtgcctgaaaagaagtcgaagctggtggaaggtgccgaagtactcagcgagcatctgcacaatatgcctcgcgcggtgcagggatccagtgcgcatgtgcctattcccgacgaagtgcggcagttgcaggagcaggcgtacaatatcacccgttccgaggaatcgctggaatcggacgaaaccgtcgccatcccgaagcacgtgttgaacaaaacggaacgcaagccattgcagggtcttgagagtgaaaacacatctcaggaatccaacgaaaatccggaatccggcaatgaacggaagaacggcgagtcgcgggaagctgaaggaagtacgaaaaacgcggatgacaatccaagaagtaggtggcgttaatggtactgctgagcgtacttgacattctgctggtcatcgtcggtggcgcaggggtggtctatcaggcggtgtgcattctcatctccctgttcaccaagccgatcaaatttcccgacgcgccgatggacaagcgttacgcggtgctgatttccgcacgaaacgaggcgaacgtcatcggcaacctcattacctgcatccaaacgcagacctacccgaccgaactggtcgacatttggcttgtcgccgacaattgcaccgacaataccgccgaagtggcgcgcaatatgggctgccatgtgatcgaacgcttcaacaaggagcttgtgggcaaaggctacgcgctgacgtatctgctcgatcagatgaacgattccggtgcatccgacccgtacgatgcgttcttcgtgttcgacgccgacaacaagctcgacaagcattacgtcgaagagatgaacaaggcgttccagtcgggattcaagattctcaccagctaccgcaattccgtgaatttgtctgacaattgggtctcttccggttctgcattgtggttcatccgtgaatctcgattcctgtcggcctcgcgcatgtggctcggcaacagctgtcatgtagggggtactggcttcatgttctcgcaggagatcatgcgtcgcaataatggttggaaattccaccttttgaccgaggatttggaattcaccatggattccttgctgcacggcgaccgcatcggctactgcggtaccgcgattctgtatgacgagcagcctgtcaccttcgcgcagagctggcgtcagcgtttgcgttggagcaagggcttcctgcaagtgttccgttattacgggccggctttggtcaaacgcgccatcagggaacgcgatttttccgccgttgatttcacgctgctgttgtgtccgttcacggtgatcggtattgcgcgcgttctgctgggactgttgttcgcgacctgcggattcgtgacatggcagagccagttgagctcgttgaccggttggacgtccggcattgtgacgtcggtgatcggcatgatggcgttggccgcgttgacgattattgtggaacgcgatcagattggcgccaccaacaaggagctgttcgcgtatgtgctgagcttcccgatctacatgttcagttatgtgccgatctcgttccaggcgatgttcgccaagtccgaatggaagccgatcgagcataagggatgacgttcgttcgctggcttgcgcgttcctgccttttcgttttcatttcgatttcctcttatgactggagtgttgttgttccatggatgattcggctgaataccggcatgtgaaacgccgtcgatacatcacggtggcgctttccgtgtcgctcaccacagtgttgtgcgtcggctatgtcgtggccgacattttcgacaagttgccgggtgttctcacattgcaggaagtcgagcatgccacagccaaaacgccgggcaatgccattgcggccgcgacgatggtcggagggcttgacgcttcgaaaaccgtggatgccgttgcggcaaaggctctgatcagccagtttgagacggctgcctccgattttggcggtgaatacgccatcgccatcgccgacgcggctggcaatgtggtggccgagcagaatctcgacacgccgtatacgccggcgtccaccatgaaaacgctgacggcgtatgcggctgcggccacgctcgacatggggtctacgttggagacgcagacctatttggagcagcgcgaagatggcgcttcgcgattggtgctcaaaggcaacggcgacatgctgctcggcgtcggcgaatctgattcggcgcacatcaatgggcgtgccgggctgggaacgcttgcggcaaacacggcccaagcgttgcggcagcggggcatcacttccgtgacgctcgtctacgatgattccctgttcggcaacgaccgttggcccaacggcatcgccgaactcgatccggaccacgtgtactacgcgccgaccgcatccatggccgtggatggcgggcgaaactggaacggtgctaatcctacggatcccgatacgttcagcacatatcccgttttgagcacgcagccggcccgcgaggccgcgctggtgttcgcgcaacgcctgactgagcggggcattgcggtgaacggttccgtggaacagggagccgttcccgacgggaccagccccattgcgacggtgagctccgcatcgctgaacgagatcatggcgttcatgcttcggcattccgacaattcgctggccgaggaattcggcagactgctggctttgcaccttaacgccggcaattcaccggccggagcggtgcagtcggttgaacaggtactggctcagcgggggatttccgccgaaggcctcaccatggttaactgctcgggactggctgaggattccaaactcaccgcgcataccctgcttgacgtgcagcagcgtaatctgacgagcgggtccggttccgccgccgctgaggggctgtcgattgtaggatttgtaggcactgctgcgaatcgtttgaacgatgctgacgaagctggtcttatccgtgccaaaaccggcagtttgggagatgtgacttccatgaccggcaatgtgtcgcgccataatggcggtgcgttgagttttgccgtgatcgtcaacgatcctgatgattccgaagccgcgaaatccgctatcgacacatttgtggcagcactaccgaagttgtgacgccatggtgtattcgtcacgtttgcgcaagggaatcggcgaactgcgcgccgcgttggaatcggccggtttgggattgcaggatgcccgtttcgcccgtcatggcgagcacgcgcccgatgtggacgctccgctgattatggtgtcctgttccggtgggcgcgattcgatggcgttggctgcggttgctgcgaaaacgtgcgcttcattgggattgcgatgcggggcgattatcatcgaccaccagttgcagcaaggctctgccggtgttgcgcgggcaaccgccgatcgttgcgttgcgttgggtcttgacccagttcgcgttcgtgcgattgacgtacccgactcccgcggcatcggtgttgaggcagcggcgcgtgaagcacgctatcatgcgattgtcgacgcatgctccgacgcttcggccgtgcttctggctcatacgaaaaacgatcaggcggaaaccgtgatcatcggtttgttgcgttccgcgggcctcgatgcggtttgcggtatgaacggttccttcatacgagacggggtgcgttttctacgcccatggctgaatgtgacccgcgaagaaaccaccggcatctgcgaggatctgcggcttgcctggtgggacgatcccacaaatgggccggatgtgggagattcgggtggaaatgagcctcttcccgcgaactatccgctgcgatcccgaatccggcacgatctcatgccatatcttgcatcattcgcgggaagcgacgtcgtgtcgaaacttgcgcttggagcgaggcttgccgaagacgatcgcgcatatcttgacgatgtggcgcaacgcgtgtgcgagcaaggcgtaaccgtgaacaacggcgagataatcattgacgtgcgtgcgttgcaatcgcaagacattgccatcagaagacgggtgattgtgcgctcgcttgcagaagcaggcatttcgtgcatggcacggcaggttgaagggatcgacaggctgatctgcgactggcacggccagaaaggtgtgaatcttcccagcggatattcagcatatcgccagaaacacgtcattcgcgtgtgccaagatggtgggcatgcgaatcgctgacgtacaagaagatattgatcacgagctgatcagtaaagaagagattgccgacatcatcaaccatgctgcagcccaggccagtgaagactaccgtggcaagaacccgctgctggtttgcgtgctcaagggtgcggtgaacacgcttgcggcgttctcgcaggccatgagcatccacgcggagatggatttcatgagcttgtcgagctacggttccggcactcaatcgagcggcaagatcaccgtgcggcaggatctgtccaccgatgttcgcggtcgtcacgtgcttattgtggaagacatcatcgattcgggcgtcacgttggcgtggctcgtcgatgagctcaaaagccgtggtgccgcttccgtggagatttttgcgctgttggaaaagccggcgcgccgtaaggtggatgttcctgtgaaatataagggacgtgagattcccgatgaattcgtggtcggtttcggcttggattatgacgagcgataccgcaatcttgattcgatcgcggtgctgaagccggaagtgtatgaaggaggtcaggcatgagttttcctggtccgggccagtcgccgaataacaacggcggcggcaataacccgttcaccaatccgtttggacgcaataataacgccggcaatggcaacgattccaacggcaagggtgacaagtccaacggcaacggatccaatggcggtccgcgtccgttctggcagtccccatggctgtgggttgtggttgtggcattgcttgccgtgaccatgttccagattttcgccggaaccggttcccagaccatcgacaccaaggacggtctgcagattctcaacggcaacaatgttgaatacgcacagatcgtagacaacacccagcaggtcaagctcaagcttaagagcgactactccgctacagaccctgataccgggcgtatgaagaactacggcaaaaacgtgcagttctactacacgtacgcgcagtccgcaaccgtggtcaaggccgtacagaaggctgatccggtcaagggctggacggcgaccatgcagcagagcagcatttggacgtatctgctgacctcgctgctgccgttcctcattatctttggtctgttctggttcatgatgagccgtatgggcggtgctggcggcatgttcggtatgggcggcaagaagaacagcggcaagctgctcgaaggccagaccccgaccaccaagttcgccgacgtggccggcgaagaggctgccgtgcaggaagtcgaggaaatcaaggacttcctgaaggatccgtctcgttacaaggctttgggtgcccgcattccgcgtggcgtattgctctacggccctccaggtaccggtaagacgttgctggcacgagccatcgcaggcgaagccggtgtgcctttctactccatggcaggctccgacttcgtggaaatgttcgtgggtcttggcgcctcccgtgtgcgcgatctgttcgatgaggccaagaagaacgctccggccatcatcttcatcgatgagatcgatgccgtcggtcgtaagcgtggcggttccggtatgagcggcggccacgacgaacgtgagcagacgctgaaccagctgctcgttgagatggacggcttcaataacgacaccaatctgatcatcatcgccgcgaccaaccgccccgacgtgcttgatccggcactgcttcgcccgggccgtttcgaccgtcaggtagccgtcgaagcgcctgatttggaaggccgcgaggctattttgaaggtgcatgccaagggcaagccgttcgtgcctgatgtcgatctgcgtatgatcgccgtgcgtacgccgggctttaccggcgctgatctggccaatgtgttgaacgaagccgcattgttgtgcgcccgcgccggtgcgcagctgatcgacaaccgcgccatcgacgaggccatcgaccgcgtgcaggcgggcccgaagcgccgttccaagggcatggcgctcgacgaactgcgcaacaccgcataccacgagggtggtcacgcgctggtggcggctgccatgaacgataccgatccggtcaccaaggtcaccattctgccgcgtggccgcgcacttggctacactgcggtgatgccgactgaagatcgctattccatgtctcgcaaccagctgctcgaccagatggcgtacgccatgggtggtcgcaccgcggaggaagtcgtgttccacgatccgaccaccggcgcttccaacgacatcgaaaaggcgacgaacatcgcacgtcagatggtgctcgactacggcttctccgacaagctgggtgccatcaagtggtccgatgacgaacagagcgaccttggatcgctgaaccacaagtattccgcacgcaccgccgaaatcatcgacgaggaagtgctcaaactggtggaaaccgcgcataccgaagcgtggaacgtcatcaacgagaatcgtgagattcttgacgagctcgtacgtcagctgctcgtcaaggaaacactcaacgaaaaggaacttgcggaaatcttcgctaatgtcaagaaggcgccgaagcgtgaagtgtggctgagcgacagcaagcgcccggattccgacattccgccggttccgattcccgaatccctgaagaaaagcgcaggattgaccaactgatgagcgataccgaagcattcgataccctcttcgacgacaaggcccgtgccgcccatgcggctgggcctgtcggctatgacgaggaaggcgtgcgccaggcagtacgcctgtttctgaaatccattggcgaagacccggaccgtgaaggcctgctcgacacccccgaccgtattgggcgtgcctgcaaggagctgttcgcaggccttggacacggccccgaggaagtgctcaaaaccaagttcaaagtcgataccgacgaaatggtgctggtacgcgatattgaactcttctcggtatgcgaacaccacctgctgccgttccatggcgtggcccacgtcggctatattccgtcgaacggccaagtggcgggcttaagcaagcttgcacgactggtggaactgtatgcccgacgtccgcaagtgcaggagcgcctcacccaacaggtggccgacgcgttgatggaaggtatcgaagcacgtggcgtgatcgtagtcaccgaatgcgatcacatgtgcatggccatgcgtggcgtaaagaaggcgcaatcgcgtacggttacatcggcggtgcgcggctgcatgcgagacgcgacgatgcgagccgaagccatgagcctgatcctgtcgcagcatgcgtgatcggcgcgactgcagcaagtcgaatcgtaaataccaataaccggatataggaggggaaaccggatgaccattgatatgaaatcgattcatgatagtgaccgtacgctggtgatgggcgtgctcaacattacggaggattcgttctccgatggagggttatggctcgatcctgcgaatgcgaaagcacacggcgaagcgatgatgaaagatggggctgacatcatcgatatcggtgccgaatccactcgccccggagtcaaacgtgtcagtgaggaagacgagcagacccgcgtgctaggtgctgtggatgcgctgattccggaaggcgcggtgctgtccatcgacactacgcgcgcatcggtggctcgcatggtgttggagcatggtgcgcagatcatcaacgacgtgtccggcggtcagctggaccgcgaagtgccccatgtggtggccgaacacgcggaaagcctttacattgtgcagcattggcgcggttggcttgccggctctgcaggcgacgtgcctgacgctaatacgtccgtgtacgccaatggcgtggtgaacgacgtgtatgacgaactcatgaagcaggtcgacgacgtgcttcaggcaggcgtctcgccgtcacagatcatcatcgacccaggacttggattctccaaaccgagcgtcgaacataacttcccgctgatggtggcgttggagcggttcaacgccaccgggtatccggtgctgatcggagcctcgcgcaaacgattcgtcggcgcggcgcttgccgatgccggtatcgacgagccaagcatgggcagcaaagacaatgcgaccgccgccatcagcgccctgtgcgccgaatatggagcgtgggccgtgcgcgtgcatgacgtggagaaaagccgtgacgcggtggccatcggcaatgcgtggcgtgctttcgccaacgtctgatacgcgcggtgggtgcatacgttcgtatgctcttgactgcgtaggcacggcaacgcctcacatcactaaaaccttgagatatgcaaagaaaggctggcatggatcagattcgattgactggcgttcgcgcggtcggcaaacacggtgtgcttgatttcgaacatgagcgtgcgcagacgttcgtcgtcgacgccacgctgtttctggatcttgcgccagccgggcattccgacgatctgcacgacaccgtcgattacggtgccatcgccaaaggaatagtcgccattatcgaaggcgatcatgtcgatctcatcgaaaaactggccgatcgcattgccagcatgattcttgaatatcctgccgtggcgcgaacgcaagtgaccgtgcataagccgagtgcgccaatcgtcgtaccattcgacgatgtgagcgtaaccgtggaacgttctcgtgaaacaacttcggctgcatcgcaagtgcatcatgccatcattgccatgggtggtaatcagggcgatgtagtggccaccttgcgtgacgcggtgcgttcgatcgacggactggcgtccactcaggttacgggcatttcgccgctgtaccgtaccgatgcgtggggcatgcccgatggtacccccgacttttacaatgcggttgtttccgtgaccaccaagctatcggcaatggagctgttgcgaggattgcagcgcatcgaagccgaacatggtcgagtgcgtaccgaccattggacttcgcgcacacttgatctggacatcatcgattttgacggtcagagcagcgacgatccggacctgacgctgcctcacccccgtgcatggcagcgtgcgttcgtgctggggccgtggctggcactcgaacccgatgccgaactgccgggcgaacatgccggttccgtggctcaactcctccatgaatcgaccgatcgcgaccatatcgacgaaatcgcagatgattggatggtggaaagcccgaccggctacggtaccgacgaccttgcctgcgatgccaataatgcgggcgatgcggatgatatgggcgaagcgtatgatgcgatcgattccagcgatttgccggaaggaaccgccgcagccaaagtggccgcactcgcttctgcacagctagaacccgcatcgaaacgtgcggtgatctcactggacagcccagcaaccgatgccgaacagcagttccgcatggccatcgtcacattggacggcattcccggcaaccaagtcgagggcatctcacccctctaccatgtgagccaactcgacggactccccgacaaaatggccgcggtaatccagatttccacgcgcatgggcgcccatgatctgatcgaagtattaagcaatgtggaagcctccatcggcgaagacttcgatctcgacctgatcgacatggaaggcgtgacatgcgatgaacctgactgcaaggtgccgtggcccaccgcacgcaaccatgccgcagtgcttgcgccatggctcgacatggatcccgatgcgcgactgggcaaggatccggtatcattcctgctggccatggcccccgataccgcgcaagtgggactgctgaccgacaattggatcatcggaggtacgctatgaaagcgcgcagaaccccttggtggtgctatgttctcgctgccgcattaggattgctggccggtatgggattggcgaaatatggcgagatttcaggtttgccattggtcggcgctccatggatcgtgcccgtggtgttggcgattctgggattcgtcgtgctgtatatggcattgcagatccacaaatacaccaccacggatcccgaaaaacgcgcgcagctgaaacctttggacccgcagaaggcgttcgccacactggtgtcatgcaaagcgttgggcgtggcaggagcggcgttggccggctggtatggtggacagctcatcatgagcctgccgcatggtgaggcgacgttctacagtcaggccatcctcgaatgcgcgatcgcggcaatcgtatgcatcgctgacatgatcatcggcattgtgggggagtggttgtgtcaaatcccaccaatcgacggtccggaaagcccgaaaatgaaaacggccacgcaacgaaaccgttacgcggccgcggcaaccaaatcggcaacccaaacgaaagcctgattgtccttacttcttcaaatcctcctcaggaacacggatcatcgcctcctgagtcaagcaggcaacaagctcgccatcctgcgtgtataccttcgcctgccccaagccacggccgtgagccgcggtaggcgtatcctgcacatacaaatgccactgattgatgtcgatatcgcgataccaccacatcgaatgatcgatcgaagcgaacgaaatgccaggcgtggcaatacttaacccggcacgacgcaacaccggctccagcatcacctgatcgcaacccatagccaacatcgcacgatgcatgacctgcggaacgtcaaccgtgccgtcggccttcatccacaccatctgcttgccggaatcgttactggcgctcttcttatcggcacccagcatgatcgtgcgcgtcacatgacgaatgtcgaacggcgacttttccgcatagtatttggcatacgaagacttttcggcaaacggctccatcagctgcttcgcactggtcaacgtttccggctccggcacgccttccggcatgggatcggcgaactcaatgccatcctgaccctgctcctggaagctggcgatggccgtcagaatcgaaccctgagcctgcgtgacattcacgcgacgagcggaaaacgagcggccatcacgcagattctccacatcaaacagcaaatcctgacgaatatcgccggcggaaatgaaatagccatgaatcgaattcggcagacgagatggcggaaccgttttggatgcggccatcatggcctgcgcgatcacctgaccgccgtacacgcggccagtggggaaatacaggctttcgccattcacatatgtgtggctgcggtacgtggaaggcgtgcccagctgaagcaccttcgccaaccgttgtaacggagttattgctgtctgcgctgtctgtgtcataacgggcctcgattctttgagtcgcatacgataaacgcttcgttttggaaacgagtctacgcaagggcggtaaatttcgccggattgttttgtaacgaatgcgtgagaagcgtgaacggcaggtaatcgtcaaacgattcacatacggcaaagcgccgcacttcgtaacgaagcacggcgctttgctgaaatttgcgagtaacgttcgcaattatggtcttgcttcgcaaggctcattgttgccttcgttcggctgtcgcctcactcaggccaagcctacagacagtacacaggactgtctgcttaacggctagcctgtggccctgcaattatggtcttgcttcgcaaggctcattgttgccttcgttcggctgtcgcctcactcaggccaagcctacagacagtccacaggactgtctgcttaacggcttagcgcgttagcttgcgatggagacggtgggggcgagccgcgtcttcgccgagacgagcgacacggttctcctgataggcctggaagttgccttcgaaccagtaccacttggctggattctcgtcatcgccttcccatgcgagaatatgcgtggccacgcggtcgaggaaccaacggtcgtgagagatcaccacagcgcagcccgggaagccaagcagtgcgttttcaagcgattcaagagtttcgacatcaagatcgttggtcggttcgtcgagcagcagcaggttgccgccctgcttcagggtcaacgcaagattcagacgattgcgttcaccaccggacagcacgccggtgagcttctgctggtcggaacccttgaaaccgaaggacgccacatacgcgcgggtcggtacttcaacgccagcaacctcaatgaagtcaagaccgtcagacacggcctcccacaggttcttattcgggtcaagaccggcgcgattctgatccacatagctgatctgcacggtttcgccgatcttcaacgagccagacgtcaacggttcaaggccaacgatggtcttgaacagggtggacttacccacaccgttcgggccgatcacgccgacaataccgttacgcggcagcgtgaagctcagatcgtcgatcaacacacggtcgccgaacgccttgtgaatatgctcggcttccagcacagtagagcccaagcgcgggccggccggaatctgaatctcggagaagtcaagcttcttgttgttgcgtgcctcctgctccatctggtcgtaacgctccagacgagccttgttcttggcctgacgggccttcggcgaagagcgcacccaatcaagttcgctcttcaaacgcttggcgagcttggcatccttggcgccctggatctccatacgcttggccttggtctccaaatacgtggtgtagttgcccttatacgggtacagctggccacggtcgacctcgcagatccactcggccacgttatccatgaagtaacgatcgtgggtaacggcgatgacggcacccttgtactggtgcaggaactgctccaaccacagaatcgactcggcgtcaagatggttggtaggctcgtcgagcagcagcagatcaggagcctccagcagcagcttgcacaatgccacacgacggcgttcaccaccggagcataccgttaccggagtatccggatccgggcactgcaaagcatccatagcctgctcaagctgagaatcaagatcccaaccgtttgcagcatcgatatcgttctgcagcttgcccatctcatccatcaaagcatcgaaatcggcatccggattggccatctcttcgccaatctgattgaaacgagccaccttttcagcgatctcgccgaacgccatcttgatgttctcgccaacagtcttggtgtcatccagcggtggttcctgctgcagaatgccgacggtataacccggagtcaaagaagcctcgccattagacacggtgtcgagtccggccatgatcttcagcagcgtggacttacccatgccgttcgggccaacaacgccaatcttcgcgcctggcaggaagctcaaagtcacgtcatcgagaatcacacggtcgccgtaagccttgcgggccttgatcatctggtaaatgaattcagccaatgttgtgttccatccttaagaaacgttggaattccagcgtgttgcatgagcggtcaacggaaactcaatcaaggattccggaacgcaacccacgcacaataccgtgcataattatcccataccccatctacacgacggtatgggcgaaagtcgtgcgctcaggcagtaagcggaagtagcagatgctcatgcaaagcaggacgaacgatattgtcgaaatcaccagattccgggcattgaatcgcaacaaccaaaccctgcttcggcaaaaccgtagtaatctgaccgtacgcaccatccgcacgatatgccccctcataaggcgacatccagaactgatagccataaccgcacgtccaaatattgctatacggagtgtcgatctgcttaccggaagcctgcttgacccacgattcgctgacaatgcgcgtgccatgccaagtgccatcattcaaatagacctggccaagtttcaacatattcgcaagcgacatgtagatcccgccgcctgcaatcggatgaccttgcggatcacattcccaaacaggccaaccctgatccaacttggaaaaaatcgtgccatacaaatactcgccaagacgcatgccggcagcctgctccaacatgcggcccgccaaatcagaatccgcagacgaatagcagaacgtgctgccgggctccacctcaaccctgcgagagaacatgtaccgtaaataatcaggcgcaccaacaccactgcgccggtcagggttcatcaaatacgcatgattgaaaccgctcgacatagtcagcaagtgcctcagcgtgatctggcccaactccagttgcgcatcggagggaacatactcggggaacgagtcgaccaatcgcgaatcgagcgacagcaagccatcttcaatcgcaatgccaatagccgtcgaaacataacttttcgtatgggaataaatattgcgatcctggtcgggaacgaaatgacgttccgcgataatggcgtcgccatccgcaatcgcaacggcttcgacgggcagggactcgctttcaatgagtttgacgaaatcgttgaacatatcgatggcacccatgaaatctcctttgacactgccctacggtgcattacggaaactgtaacgtaaggcggttacgtacgattgttacatcaaacgatttttcctaagcctgtcgctagatggagcgcccgaaaagccgctaggtgccatgcctgaaaaagtcgttaaatgataatgccttcgcaatgatcgatctcgtgctggatgatctgcgcggtgaaaccagtgaatgtggcatggcgctcgcggaacttgcgatccgcatacgagacctcaatgcgctggaagcgaaccgtgcggcgctcgcctttgagagacaggcagccttcggaggcgtcgtaggcgccgtctttcgcagtgatcgtcgggttgaacattacgaagatgcgaccgccgaaatcctcgtccacgaatgcaatgatgctcttcgagacgccgatcatgtttgcggccatgccgacgcagccattgcgatgtgcgtcaagcgtgtctttgagatcctgtgcgacggcaagatcctcgggcgtattgagcgcctccgtcgacggctggctcaagaacggaatggacgtcatgatttcgcgctgcatgtggtgcttcctctcgctggttcctttgctggtctgccaacattgtatggcgtcattgtgcgacgccgtacggcgatgggacggatgaccggttcgcgcctatccatttacgaaatgtctcatggcgattttgaaatgtgggaccgcaatcgatgcaatatgcttggaaccatggatgacatgcctcaatatcggaaatacatgacgcaggcgctggaactggcccataagggagctggttgggtgaatccgaatccgttggtcggcacggtggtggtccgcgacggcgagattctcgcagccggataccacgaccgctaccgcggaccgcatgcggaacgcatggccttcgactacgccgacaagcatggtatcgacatgcatggagccacggtcatcgacactctcgaaccttgctgccatgtcggatcgcagccggcatgcaccgatctaattctttcgcacggcataacgcgcgtcgtggtcggttcgatcgatccgaatcccatcgtggccggcaaaggacttcgcattcttgaggaaaacggtgtggaagtggtatatgacgtgatgcgggcggaatgcgacgccatcaatcgccatttcttccgctacatcaccacaggaatgccgtacattgtggacggcagaaaacatgcggaggaatctgatgccgaatacgctgtacgtcgacgcgggctatatgacacgtatgcggcggtgttgggcatatgtccgactggtggccgtgcgggtgccccgggtaattcgaacggtacggaaggatcggtgggaagtgccgcacgccttccgggtcggacggatcggctggatgtttcggatggtgcttttgcccatttcgacgggccggtccaagctgtggatgctaacgaggtggtggtcggaaggcacaagccgttgcatctcgacatccgtgcgctcgccgatacggaacccgacgaatggctgcgcgaactcggccgccgcaaaatcgatagcctcgtcgtcgatgatgatgacgttttcgaaatgctgtcttcgatctgacgaaaaaggtgatatgcctatgccgtgttttcagtttgaaatgtcctatatgtggcagtttttggcatttcagaaaaatgatttccgttatatgtggcagtctcccaaggaaaatctcgtctagggggtactgattggggtcttttgaggcttgaaaccggtctggtctgccacatatagcggttttggtttgtctggggatggcaaatctgccacatatagtggctttcagatgagaatctttctgcttccattggcgagagacgttatgcggatgtgtatccttcccgaggacattctttgacagagcatgatgggcttgcttaatcgttggctcatccggtcggccactcgttgcgcgagtgcccgttcctcgaagtcattcataaggttttcggcggtcacttgaatgtatgcccaaccgtcatcttctaaggcttcacgtctcttgctgtcggcgagccattggccggcgtgatgtcttccgtcgtattcgatggccacttttatatctggataggccatatccaaaagcgcgattttcccattgttcagtcgaaccttccagttgactttcggacatggtagcccattgcgaatcagagcgatcctgcaacggctttcctgcgaggaatccgtgccttcgcgcatgaactgtaacgcatgttgcatttttctgattcctcggatgggacgttgtctattcgcattcgaaaaacagtggataagtggataaccgaggttatgcgcaaaaaaatgtggataaacagtcggccgccggcagacctgattgagacgaacgtgcgctgctgcgctgctgcgggataccatggcacgggtagaacatcacgttgaaatgaggatgtatgggcgagccgtgtgtgattgaaaacgtgtgtttcgtaggttcggataagccggtcgacattgctgtcggtcacgggcgaatagcttcggtgcgaccttcggaaaggccaacggatgctgcttcgaagatatgggtgattcccggattgtgggactgccacacgcatttcacgcagtggtcgtacacgttgggacggctcgatctgattgatgcacgcagtgccggcgaagcgctcgacatgttgcgtcgacacttggaggagcgtcgtgaaagcggcgcactcgacccgaaccaatatgtggtcggcatgcgcttccggcattccctgtggtccgatgacgcccagccgaccctggccgcgatcgatgcggtggcgggagaccagccggtggcgctgtcaagtgccgatatgcattgcggttgggtgaactctgccgccgcgcgcaagcttggcgtagatgtggacgaatccggactcgtcggcgagcttgagtggttcgacgcctactgcaagctggacaaaggacctggtgcggccaatgagctgatgcatctgttgcgcaacgccgaacacgacgctgcgagtaaaggcgtggtcggcgtgcgcgactatgagatggcggagaacatcgacacgtggattagccgattctcgcaagggcttgatggtctgcgtgtcgaggctggcatatatcccgagagactccgacaagccatcgacgacggctggcacaccggagacgaattgcccggaagtcatggtttgggtcacgtcggcgcgatgaagatgatctccgatggctcgctcaacacccgttccgcctactgttccatgccatattcgggcatcagaccggaaacctacggcacattgagctatgcccctgagcaaatcgagtcgtacatgcgactcgccgtcgaacatggcttcgacatcgcctgtcatgccatcggcgatgaagcgaacaccattgtgcttgattgtgccgaacgcacctatgcgcatggttccattgagcatgcccaaatgctcaaggagtgcgacattccgcgactcgcgcagctgggacttgccgcaagcatccaaccgcagcacgccatggacgatcgtgacgtcatcgcgcgattctggggcacccccgccggaatcccctacgcattcaatagtctgcataaggcggggaccaaactgctcatggggtcggacgcgccggtcgcgccgctggacccatggctggccatctccgcggcggtattcggtacggaaagttccgaccgcgagcctttccaacctgagcagtgccttgattttgaaacggcgctcgcttcgtccaccgcggtcggacgcgtggctttgcgggacgcagacgcggccgatttggtgcttctggactgtgatccgagcataatcgattctccggaggccatgcgtgccatgcccgagcatgtgcttggcactatgcttgccggtcgctggacgtaccaacaggctgaatgaaaaccgttatgtgtggcagattccacggtgctggaaaagtcaaaatcgctatatgtggcagacctgagatttcttaacgggatttttctatagatttataccctcgaatgtagtgtgaatctgccacatatagcgcaaatcggattttgaagatgccttaatctgccacatataagggatttcagatgattggtgtgcccgtgcaagatgagtatggcgtgcgagtccactcggataggaggaagaccgcacctctgagtgggagatacggccttcctgatgtgattttgagtgagaatcactgcacggcggcgagagcctgatcgagatccgtgatgatgtcgtcggcgttttcgatgccgcagctcaggcgcaccaggtcaatgccaacgcctgcttcgacgagctgctcctcggtgagctgacggtgcgtggtgcctgccgggtatagggtgcagctgcgcgcgtcggccacatgtgtggcgatggacaccatcttcaggtggtcgaggaacgcggacaccttttcgcggccgcccggcacgccgaaggaaataacgccgcaagtgccgttcggcatgtacttttcagctagcgcatggtacttgtcttcctcaaggcctgggaagctcacccagctgatgcgcgggtcggcgctcagccactgcgccaccttgagcgcgttcgcgcaatggcgctccatacgcacgcccagcgactccaaatgcatgcccatgatccacgagttgatcggcgccggcgttgagccgaaatcgcgcatgagctgtgcggtggctttggtgatgtaagcggccttgccgaagtccttggcataggtcacgccatggtaggaatcgtccggcgtagtgagtccggggaatttctccgcatgggccatccagtcgaagttgccggaatccacgatcgcgccgcccacgcaggagccgtgaccgtccatatatttggtggtggcgtgcgtgacgatatccacgccatactggaacggtcggcaattgacgggcgtcgggaacgtattgtcgacgatcagcggcacgccgtgacgatgcgccgcgttcgcgaacttttcgaaatcaagcacgatgagtgccggattggagatggattcaccgaagaccgccttggtgttcggctggaatgccgcttcgagctcttcttcggtgcagtccgggcttacgaacgtgcattcgatgcccattttgcgcatggtcacgttgatgaggttgaacgtgccgccgtagatcgcggaggatgcgacgatgtggtcgccgttgttgcagatgttgaacagtgcgaagaagttcgccgcctggccggatgaggtcagcattgcggccgcgccgccttccatttcacagattttcgctgcgatggtgtcgttggttggattctgcagtcgggtgtagaagtatccggattcggataggtcgaacagtcggctcatctgttcgcttgacttgtatttgaaggttgtcgcctgaatgatcgggggagtgcgggattcgccgttgccgggctggtagcctccctgcacgcagatggtgtcgacgttttcgctcatggattccttctttcgattgcgcgcttcgttgcgtagcgctgcgatgcaacaaacatgttcactttatcactgagttgataattggctatttttcaatggaaacgccgaatagttcactgaattgacaaacttaggaagttgattttattatgtacatcaagacaggcgggaatccgcttgacgggaaaagcaaggtcttacgaaagtaaaaaccaatagcaaaggagcaacccatgggtctgtgggatattgaaaagattccgtatgtcggtcgtgaaaaggggccgcaggagggtctggctttccattactacgatgccgacaaggttgttgccggcaagaagatgaaggattggctgcgttttggcgtcgcttggtggcacacgttcgatcaggagctggtcgatccgttcggcaccggcaccgcccagcgtccgtggtacggcaagtactccaatgctgaggatgaggctctggccaaggtcgactacgccttcgagttcttccagaagctcggcgtcgagtacttctgcttccatgatcgtgatatcgctccggaaggcgataccctgcgcgagaccgacaagaacctggacaaggtcgtcgacaagatcgaagagaacatgaagtccaccggcatcaagctgctgtggaacacctcctccctgttcaccaacccgcgcttcgtgtccggtgcttccacctccccgttcgccgacatctacgcttacgccggtggccagctgaagcattccctggagattgccaagcgcctgggagccgagaactacgtgttctggggtggacgtgaaggctacgaaaacctgtggaacacgcagatgaagcgcgaacaggcgcacatggccaagttcttccacatgtgccacgagtatgctcaggagatcggcctggacgctcagttcctgatcgagccgaaggccaaggagccgacgatgcaccagtatgacttcgatgcatccacagccatcgccttccttaagacctacgacatcgacttcatgaagctgaacctggaaggcaaccacgccaacctggccggccacacctaccagcacgagatccgcaccgcccgcgaggccggcgtgctcggctccctcgatgccaaccagggcgacaagctcatcggctgggatatggatgagttcccgaccgacctgtacgagacttccaccgtcatgtgggaggtcctcgccgagggtcagatcggccctcacggcggcctgaacttcgacgccaagccgcgccgcacctccttcgccgccgaggatctgttccgctcccacatcgccggcatggattccttcgcggccggcctgctggtcgcggccaagatgcacgaggacaaggtcatcgagaacctgcaggccgagcgctacagctccttcgattccggcatcggcgcgaccgtcgagaacggcaccgcctcgctggcttccctcgaagagtacgctctggatatcccgcagtccaagctcatcgaggccaccaagtccgatcacctcgagtccgtcaaggccacgatcaacaactacatgatcgacgccctggccgaggcgtgagccgaatagggagtttccgttagggctcctgattcatcgctggatcaagcagtgagactcggctgtgacagagccggatgtggtgtgccgaagcgtcggcgttccggcacaccactcatctttccttccttcttcctagaatttccttcgcaggcaagtcgtctgccggttatgtcgccggtgtacggcttgtttgcgtttttgggccaaacgaaagtctcgattgttcgcaatgatgcgatgctcacgaacgtttctgaataaggtgtatttatgaccgcgactattaccattaccaatcccattcttcgtggaatgaatcctgatccgagttggatttgggatgatgagttccagcgaattgtgttggtgacttctacttttgagcttgtcccaggtcttcccatttacgtttccgaggatatgacgtgctggaagcatgtgtcgaatgtggtagatgctgacctggcaaggcgcctgcttattcctttcgtggatgattcgggcggtgtctatgcgccgacgctgcgcaggattcatggcaaatatgtgattgcatgcaccattgcccgtcttgatgatcgccgtgctatggaaggtggttgcacagaaagcgagctgatgcggttccacgccgcggagggcaattttatccttgaagcggagtctatcgaagggccatggcatggcccgttctggattgagggcgctgaaggcatcgatccagacatattcgaggacggggatggcaacgtgtactggactcagacccgtcctgcggtcaatccgcaatgggaaggccagaccgaggtctggacccaacgcattaatccggagacttggacttttgtcgatgacggtcttcctgcgggatcgggcaagacggtaatatggcgcggatacggtatggaatcggtgtgggctgaggcgccgcatctctatcgcgtgggtgattatgtgtatctgatgaccgctgaggggggcaccagtttcgaacatagcgaaatggccatgcgcatctatgcgccgcatggactgcttcgggcgttcgaagcttacgaacgggaagtatccgaattgggtgagtgcattccgcaggttcgtgacggggaacgctgctatcttggcaccgcaatccgtgccttccacgcggataagaagaatccgattctcacccaccgacatctgggtttgtcggaaccgctgcaatgcgtgggacatgcggacctgttgcttcatccggaactgggatggtggctggtgtgtctcggcgtgagagagacacggggaaagcgtgacggcgaattattgagctacttgggaagggagagctttgtcgctccggtatcctgggaacataatccggccgattggaagctggacggcaacggtgcatcatatacgcatgagggtgaccccggatggccagtgacttgcgctggtcttggccgcttggccgacgagatcacggttactactgaagacgatggcatcgccatcgagcctagggtgaaatcctcgctcgccggtgacgtggaacctgcgctggtggatgtggctgatggctcgacgagcgatgtggtggtgcgcgatgagcgtgatgtcagctaccgcagaatagcgaaactgccgacgctcatgccgattcccatgtccggttctttagtgatccggcagaattccacacattacgcggtgttttcgatgcatggcacggatgtgcgctacgagatggtgaatggagacgattcgcaagctgggtctgttgccgtacaggctgacggagtgcgtccggcggtacttttcgacgacaaccgcttgtcggtcatcgtgactggcatgcatggtctggttgattctgcgacgttcgtgcgtcaggggcaggtcctgctgagtgtcgatgctcgtttcctcagcaccgaatgggccggtgggttcgtcggttgcatggccggcttcatggcatagtttctacggaatttcaggatggttcactgctggtgttccgacgggccgtcttagaacgagttgaaaacgggtcgaaaggctaggagcgctgtgttctccctccggttgtgcctgtgaggtttgccccgctgattaaccttcgagttgctgtgtgctgttgcgtaccactagcgatgtcggcatgatgatgtgcggttggatcacgtcggtggacagcgcttcgaccagcatgcgtacggcggcccttgccatgtcttggagcggctgtcgtacggtggtcagcgccgggccaaggaatgcggcagtctgcacatcgtcgaatccgaccacggataaatcctcgggaatacgtaatcccagctgccttgccgcctcgtagacgcccatggcctgcagatcgctgccggcgaagattgcggtcggacgattcggtcgtttcaacagggagatggactgtgcgtaaccgccggaagtggtgaaatcgccttcggtgataagttcgggatcggcttcgattccatgttccgcgagcgctgatgtatatccgtccagacgtgctttggaacacatcatctcctccggtccggtgatgatgcctatgcgggtatgtccgagtgcgagcagatgcctggtggcgattacgcctccggtccagttgtccgcttgcaccgacagcgtgtctggatctggattaccgaatggatcgaacaagacgaagggaatacctctggaatgcagtttgttccgctcgatacgtgtcagactggagaagacaagaatggcgccatccgtctgccgacgcagcatgttgtcaatccaggatgagtccgggtgctggcgattgccgccttcggtggtgatgacgttcaaatcatgcaacttggcttcgcgaatggcgccacggagtacttcaagggcccaaacattatcgaaatcttggaacacgatttcgataattcgttggctttttgcacctgtcgctttacgggaatacccataccgtttcaacaccgcgttgatggtttgccgcgtcccttcggaaacgtcggctctgccgttgagcgccttggatacggtggaaagggaataaccggtctctttagctatgtcagagagtcgtaccgtagctttctttgtcgtattgcgcatgagtcactccttcttcttttcatcatatccgaaaatgcgaacgaaagtttcggtttacgtttttcgaaactttcgatatgttggcaatgcttaaaaacgttgtaaaatcaacgaaaaatagttagttttctgattttacaaaaaacttgactttgtgtgatttgtttcggtagtctgtaggtacaacgaaaacgaaatggagactttcgaagggagtcaaaggctgattctctgtctgctaggggagctgcagcagcattcgttgcggtcatgcttcccgattcgacccattcgagagaagtcgttcctgtcgttgccatcattttgtcgatgatgatttggtcaataaggagaagacaatgaagttcaaaaccattgcagctgccactcttgcggtggcgaccatgttgggcatgggtgcctgtggctccagcgctggcgccaaagacgataagaccattacgttctggcataacgcaacagctggtgacggcaagcagtattgggaggatctggccaaagcgtttgagaagaagaccggtgtcaaggttcagattcaggccatccagaacgaggatttcgaaggtaagctgactaccgctatgcaggatcccgcctccggcccggatgtgtacatgacccttggtggtgccaagaccaaggacatggttgatgccggtcaggtaatggatattactgataagattagcgataccgtcaaaaagcaaatgtcttcctcattggattccatgtcttatgatggcaaggtctatggtgttccggtcgctgcccagcctggtggcatctggtattccaaggatttgttcaagcaggctggcatcgatgccgagccgaccactttcagcgagctgaagaccgatgtgcagaagcttcgcagcgctggcatcgatccgatcgcactcggcggcaaggatgcttggccggtcggtcactggtactactggttgtccatgcgcgaatgctctccgaaggcctacgccaagggcgttaatgacaaggacttctccgactcttgctgggtcaaagccggagatgatctgaaggatttgttggatgcgaatgcttttaacgaaggattcctcaccacgacggcccagcagggcgccagctcgtccgcaggtctgctggccaatcataaggctgcgatggagctcatgggcacatgggagcctggagttctcaaggacctgactccggacaagaagccaatggctgaccttggcttcttcgccttcccgaccgtggacggaggaaaaggcgaggaaggtgctttgatgggcgctgtgaccggtttcgctgtcaatcccgaggctccggacgctgctgttgatttcgtcaatttcatggctgagaaatcaaatcaggagaaatacgccactgcgttcagcaccattccggcttccgccgaagcttacgatgcggttaccgatgaaaatcttaaggctatcctcgaagctatgaaaaagtctgatggcatgcagctgtggatggataccgctctcgacggaaatattggcaacgctcttaattccggagtggtgaatctgctttccggacaggggacttcggctgacatcgtcaaggcgatgaaggacgcagcgtccaagggctgatagtgaacatggctggttgacggccaaaggagggtggatagacagatcttcatctgccctccttcctattcgagaaacgtatctggtagtggagaaaaccatgtcaagtacaagcaaagacgcggtgacgctgcgcgctaagcggtccaagaaaccgtccgatggcaaaatgcgtcgtaatgttgagattttcgtactgtccgcacctgcgattcttctgttcgtctgctttgtgattctgcctatcgtcttgggtgcttattacggcttctatcagtggaagggctacggacttccctccaagacaggtaaattcgttggtctccagaactacatcacagcgcttaaggatcccgcgttccaggcggcgattctgcataccttcgaggtcgtgatcggctcgttggttatccaggctccgctcgccatcctgttcgcattgctgctgaaccagaagttcaaggggcgtggtctcatccgcaccctcatcttcgtgccgtatgtcgtttccgaggtcatcgtcggcacaggatggagcctgttgctacagaagaagggcgccatcaatgagattctggccaacttcggcatcaatggtcccgattggctggccgacccgaaaatcgctatttggacgctgctgttgctgatcagctggaaatacgtcggtttcgccgtaattctgatgctcgccggcatgcaatccattcccgatgaactgtatgaagcagccaaagtggatggggcgagtttttggcagatgcagaaaagcatcacgttgccgttgcttgctccgacgttgcggatctgggtgttcctttccatgattggctctctgcagcttttcgatctggtctatatcgtgtggggcaagtatgtgtcgaccaccgctggtgtgtccaccatggccacctacatggtgcgtgaaggtcgtggagccggcaactatggctatggttccgccgttgctctgatcatcttcgtgatctctttgatcatcgcactcgtctatcagaagttcgtgctgaaccgtgacttggacggtgctgttactgagcagaaagaagccgagaagcgtgccaggaagcgcgcaaaggaagtgcagcatcgtgaggttgctgccctggcaagtgaggtgaagtgatgactgccgcaacaatcgcaggacattccaacaaaagcgagtacagcaagaagaatggttaccgtaagtcatccaagacgccatggggcaacccaatcgtctacttcttctccctggtgcttgtggccatctgtatcactccggtgttgtacattatcttcggcggtttccgtaccaattcgcagatcaccaaccatccgtccgggatgccgaacccatggatccccgacaactacaagacggtcgtcgaaagtgatattttctggacggaactgaagaattctaccatcgtgggtatcgccaccatggtaggcgtcgtggtgcttagcatcatggtgagctttgtcatcgcccgatacaaattccgctatgcgccgcttatgtacgcgttgttctctgctggtctcatgttcccgatgaccgttggcattacacctttgtatctgctgattcgcaatctgggtctggccaactccctgtggggtctgatccttccgcaaattgccttcggacttcctcagaccatcatcatcttggtgccgttcctacagtcgattcctaatgagcttgaggaggcctgtcttctcgatggatgctcccgccttggcttcttctggcgcatggtcattccgctgtccatgcctggcgtggccaccactggaatccttaccttcgtgggaagctggaatgcctacatgctgccgctgttcgtgctcagtgatgccagcaagtacacattgccacttggcgtacagatgttcagctccgaacactccgttgacaccgcacaggtgttggccttcacctctctggctatgattccggcactgatctgtttcaccatcttccagaagaagatcgtcggcggtctgacaggtgcggtcaagggctgacggaatgtgacaacccacgcccggaagatgttcctttccgtcttccgggcttcatctcttatgcaagaggtacattatgaagatttccaacccggtgctcaccggttttcatgccgatccttcaatgattcgcgtcggtgacacttattacattgccaattccactttcgaatggttcccaggcgttcgcctgcatgagtccaaggacctggtgcattggaacattcttccaagcccgttgagccggtccagccagcttgatatgagaggaaacccctcttcgggaggcatctgggctcctgacctaagctatgcggatggcagattctggttgatctacactgatgtcaaggtggtcaatggtgcattcaaggattgcactaattatttggtcaccgccgaggacatccacgggccatggagcgagccgattcgcatcaacggggtcggttttgacgccagcctgttccatgacgacgacggccgcaaatacttggtgcagcagacatgggatttccgtgaataccaccaccagttcgacggtatcacattgacggaattcgacgtcgacaccatgaagctcaagccagaaacggcccgcaccatctgggatggcactgcggtgaagatcaccgaaggtccccacctatacaagaaggatggttggtactacctgtttgccgcagaaggcggcacggtgtatgaacatcaggaatctgtggcgcgttcccatacccttgacgagtactccttcgaagttatgccgaatggcccgttcatcggtaacttcgacactcctgacacctatttgcagaagcagggccatggagcgttggtggacaccccgtccggcgagtggtattacgcctccctatgcggtcgtccgtggcgtcatgataccgaaccggctcatggcacccgcggatggtgcacactcggacgcgagacctccatccagaaagtcgaatgggatgaggacggttggccgcgcgtgatcggaggtcacggcggacagcgttacgttgatgctccgaaagatgccatcgagactttggccccaacgacgcgtgacgaacatgatgagttcgattccggcgagctcggtccgaattggaacacgctacgcgtcccgttcaccgacgccatgggcacggtgggcggtggcaaactggcattgcgtggtcagggctcgctgtgcaacctgtttgacttgtctcttgtggctcgtcgctggcaggcatttgatttcgacgccgaaaccaaggtgcgtttcgatccgaagaattacatgcagatggcaggcctgaccaactattacgatgacctatgctggtcatgggcgtttatcacttgggatgagaaacgtcacgcaagggtcatcgaagtggctcagaacgatttcaaccaatatacgtcgttcctcaaggataacgccatcgtagtgcccgaagaggctgaggcggtatggctgcgcaccaaggtccgcacggaatactattcctacgaatattcctttgacggagaacatttcaccgagattccggtcaggctcgatgcgaagatcctgtccgacgattacgtgaaccaacgttacggcggcttcttcaccggcgcgttcgtgggacttgcctgcgtcgatctgtccggctacgacgcgcaggccgaattcgactacttcgactatcgggagctttccgataaccagtagacagtgccggctggcgacagagcgtccgccgtcagccggcatactcgacgggattgaattctatgggcaatgaggagcggacgagcatggttttgcaattgccgaaactgcttgacgacggttgcgtgctgcaggccggtgcgaccatacatatctggggtgccggcgaccctggacgcggcgtgctggtacgcctcgatggcaaggatcggactacgcgggtgggggacgacggctcatggagtgtgccgtacggtccgatcaaagcaggcggaccgtacgatttgacggtgcgttatgaggacggaaccgaatgcatctcgcgccaatgctatgcgggagaagtgttcctgtgttcgggacagtcgaacatggaactgcccatggcttgggtgcgtgcggactatccgctggagtggaatcgtgagcctgacccattgctgcggcaatacaaagcgattcccgattgtgacttcaacggtccccgcagcgatcatgaccatgcgttctggcaggggtgcgatgcggaaacccttggagatttctccgcgctcgcctatttcttcggacgcaggatccgtcagtggctgaatgtgcccgtcggcctgttgaacgtttcattgggcggatcgccgattgaatcctggatggatgccgacgcattgcgggcgttccccgaagcgctcgctgatcttgagccgtatcttggcgatggcgtggcgtcgaagaaaagccgcgattccgttgccgaacgggaccggtggtaccaagcgcttggatacgaggctgtggccgatgcccaccatgaatggctgccattgatcgcgtgggactgtccggaatccaagaacatcgagccgcgcgacgtggcatggcatggcatacgcctgccgggatggtacaaggatcgcggacttgccggtttccgcggtgagattaccatgagaaaaaccgtgttcctgccttcgtcggatgcgggcaagcccgctctattgcgtctgggcaccatgaatgatgccgaccatacgtgggtcaatggtgtgttggtcggtgggcgtagcaatatgtatgagccgcgggactatccggtcgcagccggcgtgttgcgcgccggcgcgaacgaaatccgcatgcgtctggtcgttgaacggcccggcggtcgtgtgacgcccggcaaacggatggcactgaccatcggagacgatgtcttcgatctgtccggcatctggcagtatgccgtgaccgccgaagctgaccgcgattgcccattcgaggatttcgtcagatggaagccgaccggcctgtacaatgccatgctcgccccgtgttttccatatgcggtgcgcgctgtgttgtggtatcaaggcgaatcgaacaccggcgaccgcgccatgcgatatggcgacgagctgaaggccatgattcaattgtggcgcgtcaaatggcatcagccggatatgccgtttctgatcgtccagcttccaaaattcgacatcgacgccattgaggatggaggctggccactcgtccgcgaacaggaatggaacgtcgcgaacgaacttgaaaacgttgcgacggtggtgacgcttgacgccggcgagagcaacgatctgcatccgtatgacaagaagctcgtcgcggatcgcgtgttcaatgccgcgatggatttggtatacggtcgccaggctcagcctcaaccggccgtggaaaccatcgaggtctgcggagatctgttgcggatgcactgtgtgtggcggagtcgctcggacgagcggatccgatcggagggccgccggctgatgacgttggacggtgacgctccccaggaaatcgaatttctatggcgcgactgcgccacatccgcgcgggccgaggcatggctggatggctgtgatatcgtggcgcgcatgacggcgcgcaggccagatgaggtgcggtacgcgtggagcaacaatccggaatccggactcatctgcgacggcgacggcatgctgattccgccgttccgcctgacattgcccacggacgatgataaggggattcatgcgtagacaggtcgcgcttcgacaaggactcgtcgatggattctccgatacggactctgtaattaccgtgtttcgtggcatcccctatgccaagccttcccgttggcgcattacgatttgtctcgtgtcatgattcggtattggacgaatttcgcggcgacgggcgatccgaacggttccggattgcccgaatgtccggcatgcggacccaatggccaacgatacatgctgctcggcggatgccacgatacatcggatagtatgtcgtatgccaggtcaagtagatgaatatagtatagtgtgagcgttcactatagcgtggtggaaatcgtgacgaaggagacgggcatgacgaaggagacggagacgcagatcgcgtccgacgaggatctgactaggctgttcgccggcaagccgacgcgataccgcaaatcgaagtcgctgccgaagtttactggcgaggccatgcgtacctgcgccacgatcaactgcatcttcttcgatgatcccgacgaggcctaccgcctgttccacgagctcgttcccgacgcgggggaaggcgtacaattcacgccgccgttcaatgtggattatggcatcggcctgaccattggccgcggcacgttcttgaacaaggatttcatggtgtgcggcggcggatatgtaacgcttggcgaggattgcctgatcggcccgcgttgtaccattgccacgccgaatcatgccttggatgcggcaacgcgactggctggctgggaacatgcttcgccggtgacgattggtgacaacgtgtggtttggtgcgaacgttacggtcacgcctggcgtcacgattggctcgaattccattatcggcgcgggttctgtggttacgcgagacattcccgccaattcgatcgcagtcggcaatccggcgcatgtaatccgcgagattcccgaacgcgatcccgccttcgccgatgtcgagggtatcgtctgacgttgggttacggtgttccctcagagcgaattcgcgtgttgccctactgctagacgtgttgtcgcacgatttcagttttgacctcacgatttgatcggaatatcgcacgattttgtttgagacgaaaatgggtgccgttgcggttggttgtgacggcacccattttgcgttgttttagtgcgatttatgctgattgatcagccgcgggcctttgcataggcctcgtacacggcttcagtcggttcgccggtttccacgccgtcgatggtgagcggccatgcgggcggttccgtttcgccggacagcacccaggcggcctgacgggcggcgccgatggcaacatactcgtcggtggtcgggcgggtcacgtccatgccgaacacgctcggcgcgagcgtgcggattgccttggacttcgcgccgccgccgataagcagaatgcgggaaatctcagcgccaagcgaacggataagctctaggcagtcgcgctgggagcacagcaagccctcgacgaacgcgcgggccatgttctcgcgtgtggtgttggccagcgtcatgccggaaagggttgcggtcgcgtccggacggttcggcgtgcgttcgccgtcgaaatacggcaccagcgtaataccgccggcgcccggttcggaagcgaatgccagggatgcgagttcgtcgtagtcgacgccgagggctgcacggccggcgtcaagaatgcgcgatccgttgatggtgcaggccagtggcaggtagtggccggtgcagtcggcgaagccggaaacggcaccggtcaaatcataggtcggattttcggaaatggctgctgccacgccggaagtgcccaatgaaacggaaacgtcacccacgctcatgccaagtccgagggacgccatggcgttgtcgccgccgcccggtgcgatgatgcaaccaccctcaacgttcttgccggcgatttccgggcttgccttgactgcggcggcatcgtgcggtccaagcacggtcggcagcatgattgcgtcggcatgctcgcgtgccgcttcggcaccttccgctggctcaagcaccatggcgatcagatcgcggcggtattcgttggaagcggcatcgtaatagatggtgccggaagcgtcggaacggtcggtgaacagcgcttccaagtgtgcgtcctcgccttctgcgaccgggccgtagccggcgatacgccagctcagccaatcgtgtggcaggcagatcgcggcgatcttcttggcgttttccggttcgttttcagccacccacgccaccttggttagcgtgaaggaagcaacgggggaggagccaactgccttgacccaacgctgcttaccacgtgcaatcacatcttccggttcgccttcttcggcgggagcctcgcccatcttttcgatgagggccgcggcctgcggcgccgagcttatatcgttccacagcatggcgtcgcgaatcacgttgccttgctggtcgagaatcaccatgccgtgctgctgaccgccaacggccagtgcctcaacgtcgtcaagtccgccggcctgctgggctgcctcgaggaacgcgtcccaccagaatttcgggtcaatagacgtgccattggggtgtttggcctggccaaagcgcaccatttcaccggtttcggcgtcggtcacgcgcactttgcaggactgggtcgaggtgtcgacgccggccacgagagttcgagtcattgtgtctccttgcagtgagctggcgcaacgaagtgcaaggaattcgcacggtccgccacctcatttagttagatgaatgaactataatgtctagtgtaccatcataaagtgatttgactatagagacggtgcgctttttcggcaaagacgcgtcaaagaggagggaaccatggcttcactgcggagtatcaatcaagacgatttgcgaaaccataatctttccgtggtgctcgactcgctgttgcgtgccaccgaaccaatgagtcgcgccgatcttgccaagaaaaccggattgaccaaagcggccatgtcggtattggtgtcgttgatgctcgacaatgagattctggtggaaggcgcgccttccggccaatcgctgtatgggcgccccagcattccgcttgaaatcaaaggtggatgcctgtgcggcatgggattgcaggccaacaccgacggttatggcgtggtggtgctcgatcttgacggttccgttgtgggggagcagtgggtcgacgccgacatggccaacgccgacgagcgggcgattttcgcccgtctcgacgaactggctttgcagcaggaagaagcgcttgccaagaaaggttatgtgcttgccggtaccggtttggcattgccgggtctcgtcaccgatgatatgcgattgcttggcgcgcgcaatctcggttgggaacgtttggatctcaagcagttcgatgtggtcaagcgacttgatcctgttgcctgcaacgaggccaatgccgccgcgttggcacaggttcccggctatgccacgcagcgtaaggattctgggcggatcaagccgacggattcgtttctttacatgtcgaccgacgtgggtatcggcggtgcagtgatccgcgaagggcgtgtggtgagcggtgatcacggtttcggtggcgaattgggccatgtttccgtcgacatgcgcggtcccgtctgccgttgcggccgtcgcggctgccttgaagtgtatgcgggcaggcgttccatggtgagcgcggccggaatcgccagcagcgatgccgccgcgacccgcagcgccatcgacgaattgatcgaccgctggcaccagcgcgatgcgcagaccgtggccgttgtggaaaaagcattggaggccatggcttccgtaatcgcatcgaccatcaatgtctgtgacgtcgacgtggtgatgctcggcggcttgtgggcgcgtttcgaacctgaactgattcgcagaatcgaacgcatggtacgcccgcaagtgctggcgtatccggaagtcgaggcaagcgtgcttgtggcggatatcgtcgatcgtccggccttgatgggcgctgcggaaatcggtttgcgacgctttatcgacaatccgctgcgtttcatgaagcaaaactagtccacccatttgctaaacttgccaagttggcatgttcgcatgttgcaacgtggggcgttagctcagtcggttagagcatcggactcataatccgccggtccacggttcaagcccgtgacgccccactctttcacaaagtcaaggcttctgatatactctgcaaggttatccggttcacgctctgccataggggctcagcgacccgggtcccccgaatctctaggagacaaactatgaagcagggtatccatcctgattaccacgcagtgcaggtcacctgctcttgcggcaacaccttcgtcacccgttccacctacagcggcgatcacatgaccgtcgacgtgtgctccagttgccacccgttctacaccggcaagcagaagatcctcgacaccggtggtcgcgtggcacgcttcgagaagcgttacggcaagaaggccaagtgagtcttattgcttaggcaatgaaaaacgccagtccgattatgggctggcgtttttcattatgcgacggatgcgcatgcgctggcgtgcatgcgatcgggatattcgtaagatgcgtgggatgcctgcgaaataccgcgcttcggcagcgtttccaaggcaccttatatgatggacaggttgagtggagttcagcgaagcgttcacgctgaagcgcagatttataagcagatagaaaaggcgtacattggcagacgagcagttccccgcggcagttaccgcacttgaggaatatcataatatcgaacagcagatggccgagccggaagtcgcgtcggatccggataagatgcgtaagctgggacgtcgtcacgccgagttgggcgttatcgtttccgcatacaccgcatacaagcaggtgaaagacgatctggaggcagccaaggaaatggcttccgaagatccggatttcgcggaagaagcgaaacgtttggagagcgagcttccggcagttgaggagaaactgcgcaccgcgttgattccgcgcgatcccgatgatgcgcgcgatacgatcatggaaatcaaggcgggcaccggcggcgaggaagccgcgttgttcgccggcgatctgctacgcatgtacatgcgatatgcggaaaagcgcggttggaccgtcaccctgcaaagcgaaaacaccaccgaactgggcggcgtcaaagacgtgcagctcgccatccgcgccaagggcactcccgctccggaagacggcgtatgggcatccctcaaatacgagggtggcgtgcatcgcgtgcagcgtatccccgtcaccgaatcgcagggtcgtattcagacgtccgcagcgggcgtcattgtattcccggaagccgatgaagatgacgatgagatcgaaatcgatcagaaagatctgaaaatcgacatcttcatgagctctggcccgggcggccagtccgtgaacaccacatattccgcagttcgtatgacccacattccgactggcatcgtggtgagcatgcaggatgagaagagccagatccagaatcgtgcggccgcactgcgcgtgttgaagagccgcctgctcgccatgaagcacgaggaggaagccgcacaggccgcagacatgcgtcactcccaggtgcgttcgctggatcgttccgaacgaatccgcacctacaatttcccggagaaccgtatcgtcgatcatcgcacgaactacaaggcgtacaaccttgacgccgtgcttgacggcgatctgcaggctgtgatcgacagcgacattcaggctgacgaagccgatcgcttggcccatcagaagtaaaggcggccgatggctaccgtattcgaactcgtgcgatccgcttcggccatgttgcgtgcgtccggtgttgacactccggagcacgatgccaaattattggccgccgaagtattcggcgtcgacctgcagaccgtcgacaaggccatgctgatgggaagcgaaacatccgaactggcgaagcaaggcgcgaagcagagcggtgaagacgctgcgttgaagcgattccacaccatggtggatcgcaggtccaagcgtgaaccgctgcaacatatcaccggccacgcgcccttccgctacctcgatctgaaggttggtccgggcgtgttcattccgcgtcaggaaaccgaactcgtggtgcaggaaggtgtcgactggatcaccaagcacggcatgtattcggcgaaagtggtcgatctgtgcgcgggaagcggcgcaatcggcctgtcattcgtgacggaagtgcccggcagcgaggtgtgggcggtcgaaaaaagcgagcaaaccgcgcaatggacccgcgtcaatctcaacgaaaccgcaaaaaagtaccccagcatcgccagcaactatcatctggaaatcgctgatgccacgcaaacaccgacgctgaaccagctggacggcacgatcgatatcgtgctcaccaatcctccgtatgtgcctcttgcggatattccgcagcaaccggaagtacgcgactacgatcccgatcttgcgctatacggcggttccgcagatggcacgcttattccggaacgcattatcgcccgtgccgcaaaactgctgaaaaacggcggtttgctggtaatggaacacgatattacgcaaggtgaacgattgtctgcattcgcgctgtcatatggattcagcaatgtgatggtgcataacgattacacaggtcgcccgcgatacatgaccgcgaaaaagcagtgatgcaacgcgtctcagaataagagatttttccaggggaacgtggtttttctgttgcaatagagttccagttggaagtccgaccattgcattagaccagttcagcggtaagcataccggttgcggaagcatccacaagatgaggcgtccggttgcgctgacaggaagagaaggaacggcagtgaaaatcaagaatgccgaaaaactggccgcactctgtcttgcggcggttatgggagtgagtgttacagcctgttcgggcggcaacatgtacgccaccagtaatgagagcgccaccatcgcggataacgatgtgatcaccatcggctcggtcaccaccaattccggtgcagccgcagcctatggcgaagccgaagtgaacgggttcaaactggcggtcaaggaaatcaacgccgatgggggaatcttcggcaaacagatcaaactggaatccatggacgacaagggtgatgtgatcgaggcgtccaacgcctttaaccgtctggccggcgacaagaacgtgatcgccgtgctcggaccgaccatttcgtcaacctccggtgccgtcgcgccgctcgccgaccagaaccagatgccgaccatcgctccggccgcaaccgccgattccgtggaaacgggcggatacctgttccgcacctgcttcaaggactcctaccagggcgagatcgccgccaagtatgcggccgaaacattgaaggtcaagaaagtggccgtgctgtatggcacgggcgatccgtattcgtctggtgtgggcaaggcttttgttgcggcggcgaagaagaacggactcgacgtggtggcggaagagaattcctctagcgccgacgataccgaatactcgtcgcagctgcagaaaatcgaagcttctggtgcggaattcctatatgcgccgtactactattccacggttggcccgtacattgtgccacaggcgcgagcggtcggctatgagggctacatcatgggccccgacggctacgacggcctcaaaaccacgggaaacaaagcgaactacaacaaggtgctgtacaccacgcattattcgccggatgacaagtccaacacgaaggtgcagcagttcatcacctcatacaagaaggccaataacggcgaatcgccgaacaccttcaccgcgctcggttacgattccgtctacatgttcaagcgggccatcgaacaagccggtgaaaacgccactcgtgccgatattcgcaacgccatcgcaggtatgagcttctccggcgtgaccggcgcattcacgctcgacaagcatggttctccgaagaaatcggtgattgtgctggaaatgagcgacggcgaaccgacatacaaagacaccatccagccggcgaaatagcgaaaaaacgcgaggaatcaagaaaaacaagacttcaactgacgaaacaacaagaaaggagggatgatgagcgattcggtcattatgttcatcggtcagatcttcaacggtctgaaaatcggcagcgtgtattcgcttgtggccctcggctacaccatggtgtacggcatcatccgactgatcaatttcgcgcacggcgacttcatcatggtcggctcctacgcgctgatgcttaccattccgttcattatcgcctgcggtctgcccgcatggttcgccgtgattccggcggtgcttgtgtgcgtggcggtgggtattatcgtggaaagggccgcgtacaagccggtgcgtgaaaaaggcaataatatgacggcgctgatcactgcgatcgccatgagcctgctgcttgaaaacggctcccaggcgctgttcggcgctgattatcagaccgtgccaaccatcgttgaaattccaacgctggtgcttggcaaactcaaaatcgacggagcgaccatcataacggtgctgctcggcatcgccatcatggtcgcgttgcagctgttcgtctccctcaccaagcagggcaaggccatgcgtgcggtgtccgaagacaaggaagcgtcgattctgatgggcatcaacgtgaactccaccatcacgttgaccttcgccatcggctccggcctggctgcggtggcggcgcttatgtactgcatttcctacccgcaggtctctccgatgatgggtgccatgctgggcttgaaagcgttcgtcgccgcggtgcttggcggcatcggttccattccgggcgctatggtcggtggcttgctgatcggcgtggccgagagtcttaccaaggcgtatatcggtacgattacggccggtgtgatcacgtcggcgttctccgacgccattgtgttcggcattctcatcatcgtgctgctggtcaagccgtccggtctgatgggcgagccggaaagcgagaaggtgtgattatgaagaaatcaatgctttccacgaagcaatcgtatgcattgtgtgccattggcgtgcttgtgctgttcggcattcttgttgcggtatgtgaaacgggcgctatttccctgtatgtcaagggtattctcatgacttgctgcattgcggtgatcatgaccacgtcgttgaatctgacgatcggtgtgctcggacagcttacgctcggctgctgcggtttcgaggcgatcggcgcatattccgccgcgttgatgagcaagttgctggttgccaacggcgttcagatggatgatacggtgcgtttcctgctggtcacgttcgtcggcggtgtggtggcatgtgtgttcggtgtgctcgtcggcattccggcattgcgtttgcacggcgattatcttgcgattatcacgcttggtttcggtgagatcattcgtgtgatcatccagaatctgaaagtggccggcggcaagggacttgcggacggccagcaggggcaggcactgatcggcatcgaccgtctcgccaatctgtatgtggtgttctgtatcaccgtcgtgaccgtggtgctgttgttcatgttcgcgcgttcccgttatggtcgtgcggtcaaggcgattcgtgatgatgagatcgcggctggcgcttccggcatcaacatcacctatatgaaagtgctcgtttttgcgatttccgcgttcttcgcgggtattgcgggtggtattttcgcgcaatatatcggtgcgctcacgccaagcatggccggttggctgcagtcgatcaattacgtgatcatggtggtgttcggcggtatgggttcgctgacgggttccattgtcgccgcggttggtctgacgattttgccggaattgctgcgtgcgttctccgcataccgcatgctcgtgtattcggtggtgctggtgatcatcatggtgttccgtccgcagggattgttcggcaattgggagttctcgctgccgaaattcgtcaacaagtggttctatccggtacgcgtgaagatgcacggcaaatcgggtgcgtctcaatcggcatctaagaaaaccaaggaaaccggcgagactaccgcatctagcgaaatcaacacatccagcgaagacaaggaggtgcaggcatgagcgagccgattctgaaggccgagcatctcggcatcaccttcggaggcctcaaagccgtatccgacttcaacatgaccatcaatgcgggcgaacttgtcggtctgatcgggccgaacggcgcaggcaagaccactgtgttcaacctgctgaccggcgtttaccagcccacggaaggtgagttcttcctcgacggcaaacgcatgaacggcaagaaaacgtatcaggtcgtgcgtgcgggaatcgcaagaaccttccaaaacattcgactgttcgatcaaatgacggtcgaagagaacgtgcttgtggcgttcaacgaatccttcacctaccggctgggcggtgcgatcttccgcacgccgaccttctggaagcaggaacgcgacatgcatgccaaatccatagacctgctgcgtattttcggactggaaggattggccgaaaccgaagccgcgaatctgccgtatggagcgcaacgtaagctggaaatcgcacgagcgttggcgaccggcatgaaactgctgttgcttgacgagcctgcggcaggcatgaatcctacggaaaccgaggatctgctgaactgcatcaacacgatccgcgaccgtttcggcatcgccattctgctgatcgaacatgatatgagcctggtgatgaacgtgtgccagcgtattcaagtgcttgattacgggcgtaccatcgcctccggaacgccagaggaaatcgccaacaatccgcaggtcatctccgcatatcttggtgcggacgatgctgaaaacaatgccgtcgaaacgtctgaaacgaccgaaaggaaggacgcctgatgctgcagatcaagaatctttccgtctcctacggtgccatcgaagcggtcaaaaacatcagtctgacggtgaacgacggcgagatcgtgtcgctgatcggtgcgaacggtgctggcaaaaccacgacattgcataccatcacaggtcttactccggcggtttccggcgaggtgctgttcaacggcgtggacctgctgaaaacgtcgaacaataagatcgtgaccctcggcatggcgcatattcccgaaggacgccacgtgttcacgcgcatgagcgtgcaggaaaaccttgaaatgggcgcgttcagtctcaaagaccggtctcacatggcggacgatcttgccatggtgttcgacatgttcccacgcctgaaggaacgccgcaaccagaaggcgggcacgctttccggcggcgaacagcagatgctggcaatgggccgcgccctgatgagccacccgaacacgattcttatggacgagccgtcgatgggtctgtctccgaaactcgtcaaagagatcttcgccattattcgcaagctgcatgatcagggcattaccgtactgctggtcgaacagaacgcgaatatggccctgtcgatcgccgatcgtgcgtatgtgctcgaaaccgggcgcatcaccatggaaggcgacgccaaggagctgatggacaacgagcaggtgcgcaaggcgtatctgggcgcataaggtcagtttcaacgcagttgaagaatcctgccttacaatggtggggtcagcaagccgaaaagggaggtgtcatgagcgagattcgcactatttcagacgaatcccttgcccaggctgtcgaaatcgtacgtgacggcggattgattgtgattcctacggacacggtctacggcgttgcgtgcgatccgcgcaacattgaggcgatccgcaaggtgttcgcggcgaagcaacgcccgaaatacaagtcgttgcaagtgctattgccgtctattgaaagcatggagaagctgcatttggatctgccggtgccgctgaaccgcctgtccgccatgttcatgccgggcgcgttctctccgatcgccgtggccgatgacgattgcacgctcgccacggtacgtaccgatcccgccaccggcaaggtcacgcagggcgtgcgcattccgaattccgcggccgccttgcgtgtgctgcgcgctaccggaccgttggccgccaccagtgccaaccgttccggcgatgaaagtgcgcaaaccgttgacgaggccgtgcaggcgcttggcgatgcggttgatttgtatttggacgggggagcgactcccggtcatgtggcttccacggttgtggcggctgaccctcatgggcgtgatggcattgcgattcttcgagagggagtgattcacgagccggttatccgaaaggccttgacgttgaatggcggtgctttgggcgtatgagaatctatctgttcattgctgcgattgctggcggcgtcacctatttgatcacgccgttgattcgccatatcgccattgagatcggcgccgtcggcgaagtgcgtgcgcgagacgtgcataccattccgacaccgcgactgggtggtttgggcatgctgatcggtttcaccgtgtcgatgctgttcgcatcccgcattccgttcattcaaggattgttcgcgcaatcgcaacaggcgtgggtgattctcgccggcgccattatgatcagtctgcttggcatggccgacgacttgtgggatcttgattggatgctcaagcttgccggtcagctgttgatttccgtgttcgtggcatggggcggtctgcagatcatttcgcttccgcttggctcgttggtgacggcgtcgccgagcctgtcgatggccatcaccgcgtttttgatcgtcgcgtccatcaatgcggtcaatttcgtggatgggttggacggtctgtcgtcgggcattgtggcgatcggcggcatcgcattcgccatttattcatacatcatcgcccgcaactcgccttcgtacgcttcgatggcgacattgatcgacattgccatggtcggcatgtgcgtgggctttttgatgcacaactggcatccggcgaagctgttcatgggagactccggttccatgctgctcggctatttgatcacgtgcgcgtcgattgtgatgacgggccgccttgacccggccagtattcatgccagcatttacttgccggtgttcatgccgattctgctgccgattctggtattgttcctgccgattctcgacatgtgtcttgcgattgtgcgccgcttgcgcaagggacagtctccgatgcatccggaccgcatgcacttgcatcatcgcatgctgcgcatcggccattccgtgcagggggctgtgctgattctgtggggttgggcggcactgatcgcattcggctcgattatgacgctgtttttcaaggcccaatacgtgcttgttggattcctgattgcggccgtggtgctgaccgtcgccaccatgtatccgtatgtgaagcataggattcccgagatgctggaggaggacgctgcggatggcggcagacatgcgtcggtgcggtcgtcgaagcgtcggaaaaactgattaaacgctttgccttgcggtattagttaactttcataacacccttgtttgccgcttgttctgccgtgtcgcggtaagtcagcccgcgttcatatagtgggtctatggctacaattcctgatatgaatgcagattccacgtacgctccacttcctccgattttcgcgcagcttggcctcgcctatgacgatgtgctgctgctgccgaacgagacggatgtcattccgtccgaagtggacaccactacccatctgacccgcaacatcacgatgaaggtcccggcgatctccgccgcaatggacaccgtcaccgagtccgacatggccattgccatggctcgtaatggcggcatcggcgtgctgcaccgcaatctttccatcgacgaccaagccgctcaggttgacatcgtcaagcgctccgaatccggtatgatcaacgatccgttgaccgtcagcccggatgtgacgctggctgatctcgacaagctgtgcggccgtttccatatctccggtctgccggtcgttgacaacgacaacaagctcgtcggcatcatcaccaaccgcgacatgcgtttcatagcctccgaggattacgaccggctcaaggtttccgaggtcatgacccgcgagaacctcattaccggcccgtccaacatctccaaggaagacgcccacgacctgctggccaagcacaaggtcgagaagctgccgctggttgacgatgaaggccgcctcaccggcttgatcaccgtgaaggacttcgtgaagaccgagcagtatccggacgccaccaaggacgaacagggtcgtctgcgcgttgccgccggcatcggcttcctgggtgacgcctacaaccgtgcttccgctctgatggaagccggcgtggacgtgctcgtggtcgacaccgccaacggtgaggccaagctggctctcgacatgattcgccgtctgaagtccgattccgcgttcaagggcgttgacatcatcggcggtaacgtggccacccgtcagggcgctcaggccatgatcgacgccggtgttgacgcagtcaaggttggcgtgggcccaggctccatctgcaccacccgcgtggtggccggtgtcggtgtgccgcagctcaccgcagtgtacgaggccgctcaggcctgccgtgccgctggcgtgccgtgcatcgccgacggtggcattcactactccggcgacatcgccaaggctctggttgccggtgcctccaccgtcatgctcggcggcaccctcgcaggctgcgaggaagctccgggtgagaaggtgctgctgcacggcaagcagtacaagctgtaccgtggcatgggctccctcggcgccatggctccgcgtggcaagaagtcctactccaaggatcgctacttccaggccgacgtcacctctaacgacaaggtcgttccggaaggcgttgaaggcgaagtgccgtaccgcggaccgctgaacgcagtgctgtaccagatgatcggtggcctgcaccagtccatgttctacatcggcgctcacaacatcgccgaaatgccggaacgtggccgtttcatccgtatcaccgacgctggcttgcgcgaatcccatccgcatgacatcgtcatgaccgccgaagctccgaactactccggccgccagtgattgctgaattccagtaatcaaaatcggtaaaagcctcttacttctcggaaaagaccgaaagtaagaggctttactcgtatctgcaacgtgaatatttataaccgaacgtcgccctatcgccaagtagcggtgattgatgtacgaagcaaatcgcgaaaaacaaacgtgacttcccagtgcgtgggccttccaatctccctacctcgcggtatcttcgaatgttcagctgaagcgtgccaagcggcacgcgcacacgcaaaggaaacgaggcaaaatggttgacgcacatgacggcgaaacgtatacggcgaaagattcgcgactgatttggatcgattgcgaaatgaccggcttggatattttccacgatgaactgtgcgagatctccgtggtaccgacggattttgacctcaacgtgcttgacgagggtattgatttcgtgatcaagccgtctaatgcggccgttgccaatatgaacgatttcgtgcgtgccatgcacacccgttccggactcatcaacgaatgggagaacggcctgagcgtcgaagaggctgaacggaaagtcaccgaatacgtggcccgcttcaccccggacggcgtcaagccgctgctcgcaggcaactccatcggatcagacaaaaaattcctcgaccgttatatgccgaatctcatggaacacctgcactaccgtgtaatcgacgtgagcacgttcaaagagcttgcccgccgctggtatcctgccgtatacaacaaccggccgccgaagaatggtggacatcgcgcgctcgccgacatcatcgaatccttggacgaactgcgctactaccgtaaggctttcatggcagcggcgcccggtcctgacgcagccgaagccaaggcgatcgccgatcagatcgtggcaaccagcattctgaacaacaactgattccgcatatcgcacaatcgttggaaaatctgatattccaacgaaaacatggaaaggactccagtgagcgcagccgattggaccagcatcgaaatcccgcaagacattcgcttggtggttgccgatatggacggcaccctgcttgatgagcatagcgagattccgcaaggtttctggccgatgcttgcccggttgcgctcacgaggcgttgaattcgtgccggcatccggacgccagtacgctaccttgcgtgccatgttcgccgataaggcggcgcaggtgcttgacggcggcgaactttcgtatatcgcggaaaacggcaatgtcgtggccattgacggtaatatcgccgaagtgcacggcgtcgataccgatgtgacccgctggaccatcgacacggtgaacgcttctgccgcggctggcgaatacgatatgggattggtgctttgtggcctgcgcacggcatgcgtgcagcgcacggacaagccgttccttgatgaagtcggcaaatattatgcggcactggagattgtggacgatctgcatagcgtgcttgaagatgtgatcgcatcaaacggcgaaagcgacaccatgctcaaactggcgattctcgatttcgacgatgccgaagcgatggccgcggaaaagctgacgccactgaagaacgattatcaggtggtggtttccggcaaactgtgggtcgacatcatgaatgctacaaccaataagaaacagggcgtcgaagcgttgcagcgcgtgcttggcgtcactgcggcccaaacggcggtatttggcgattatctcaacgatttgcagatgctttcggcagggcagtggtcgtttgccatgggcaatgcgcaccccgcgttgaaacaagccgcgcattttgtggctccatccaatgccgatcacggggtgcttcaggttgtcgacaagctgattgcgtaaggaagccgtttcttcgaaattgatggtcgattgaacaggaaaggcggtgcggcatgcggcaggctgaggcattggcgattctgcaaagtggcgcgagcgtcttcctgacgggtgcgccgggtgctggcaagacctacgtgctcaatgagttcgtgcgtcaggcccgtgccgaaggtgcggcggtgtcggtgacggcgtccaccggtatcgcggccacgcatatcaacgggcagaccattcattcatggagcggtgtcggacttgccaacgcgcttaccgacaatctgatcaaaaccatacgtacccgacgcaaacgtaagctgcagggcgctgacattctcgtcatcgatgaggtttccatgttacatgcgtggctgttcgacatggtcgatcaggtgtgccgcattattcgacgtgaccaacgcccgttcggagggcttcaagtggtgctgtccggcgatttcttccagcttccgccagtgagtgtgggtggacgcaaccacgatttggtcacaccaagcccggaattcgtggcttcccgcgaacgatatgcgaaagcgggactcaatccagatggtttcgtcaccgaatcattggtatggcgggaattgaatcccgcaatctgttacctgaccgaacagcatcgtcaggatgacggcagtctgctcaccgtattgaccgatattcgcaacggttgcgtgaacgacgacgatcgcaatgtgctcctcaccagactgggcacaatccccgaacctggtcaacaggccgtcaatctgtttcccgtcaacaagcaggcggacacgctcaacgacatgcgcctgttcgaaatcaacgaggagccgcacgaatatttcgccgaagccgcaggaccagtcaatctggtggaacgtttgaagaagaacatgcttgcccccgaacgtttgcagctcaaaaccggggctgcggtgatggccgtacgcaacgacaccgaccaccaattcgtgaacggatcattgggtaccgtgcgcggatttgccgccgaaaacaagggcggatggccgatcgttgaatttgaaaacggcaatatcgttaccatgaagccgaattgctgggaaatgatggacggcgacacagtgctcgccagcgtcaaccaagtgccgttgcgctgcgcgtgggcgatcaccatccacaaatcgcaaggtatgacgctcgagcgtgcggtgatggatttgcggcgcaccttcgcgcctggcatggggtatgtggcgctgtctcgcgtggaaggcctgcaaggcctgtatttgaacggtgtgaacgaacgcatgttcttggtttcgcccgatgcggtgcgattggatggtgagttgcgtctcgcctcggcgcaggcatccgatatgttggctcatgatggcatcgccgcgttccggcagaacattgccgttcccgacggtgacgagttcgcgcaggacgcgctgttctagtatggcgattgccttgtttgacatgtatgatgatttttgggattcgacggatatgactgttgtgttccgtccgtgcgttgccatgcgtcggtgaacgggtggttggattgggcttacgtccccttgcctgagtagttttgggcatatgactaaagcacttcgtatgtccaccatgttcctgcgcactctgcgtgaggatcccgccgatgccgatgtcgtatcggataagcttctgcagcgcgcctgctacctgcgcaaggccgctccgggtatttggacctggctgccgctgggcctgaatgttctgaacaagatcgaaaacatcatccgtgaggaaatggcttcgatcgacgcccaggaagttcacttctccggtctgctgccgcgtgaaccgtatgaggccacccatcgttgggaagagtatggcgacaacatcttccgtttgaaggatcgccatgaggccgactacctgctggcgccgacccatgaggaaatgttcaccctgctggtcaaggacctgtactcctcctacaaggatctgccggttaccctctaccagattcagaccaagtatcgtgacgaattccgtccgcgtgcaggcctgattcgtggccgtgaattcatcatgaaggatgcctactccttcacgcttgacaaggaaggccttgtcaaggcgtatatggacgagcgtggcgcctacgagcgtattttcaaccgtctcgatttgaagtatgtgccggtgcacgccatggcaggtccgatgggcggtttcgaatccgaagagttccttgccccgatggaaatcggtgaagataccttcgcacagtcgccgagcggcaaggcttggaatgttgaggcgctgaccactccggaaccggaagccatcgacttcagcaacactccggccgctgaaaagcgtccgacgccgaatgctgaaaccatcgatcagatggttgaatttgccaatgccaaccatccgcgttccgatggccgcgcgtgggaggcctccgacattctgaagaacgtggtgatcgccgtgatgcatccgcaggatgacgagcatgacgagccgtggcgcgaactggtggttgtcggcgtgcctggcgatcgtaccgttgacatgaagcgtcttgaagcgcagttcactccggctgaaatcgaagaggccaccgacgaggatctgaagaagcatccggaactcgtcaagggctatattggcccgatggcgtttggcccgcaggctcgcggcggtgaaaaggctgaaaacgccaacgaaaccggcgaagcgttgcgttacctcattgacgcgcatatcgcccgcggttccgcatggttcaccggtgccgatgaagccggagtcgactactacgatctcgtgtacggtcgtgacttcgaagccgacgacgtggtggaagccgtgcaggttcgccacggagacatgagcccggacggttccggcccgctgagcttcgaacgcggtgtggaaatcggccaggtgttccagctcggtttgaagtattccaacgcgctcggcctgaaggtgctcgaccagaacggcaagaccgtgccggtgtggatgggctcctacggcattggcgtgtctcgtgtgatggcttgtatcgctgaaacccaccatgacgagaagggcttggcatggccggccatcatcgctcccgcccaggtgcatgtggtggccaccggcaaggatgcggctgcattcgaagccgccgagcaactgatcgccgatctggaagccaagggcatcgaagtgatcttcgatgaccgtaagaaggtttccccgggcgtcaagttcaaggatgccgagcttatcggcgtgccgctgatcgccgtcgcaggccgcgacactgtcaacaatggcaccattgaagtgcgtgaccgcaatgtcgagaacgccgaagccgtgcctgtcgccgacgcagcccgggtgattgccgatcgtgtcgccgcgctgctgaagtaagaatcgtaaaccatttcgattattccaaggattacacggaagattatggatgcaccatagtcttccgttttttttttaaaaaaaaagtgatcgaagaattgcagaaaatattcattgggaaatcagacgaaatcctacacacctatcgacggtgcattgctgtggataagtgaaaagatatccacctactatccacgactcgcccgaaatgacgtcctctatccacattcgtcagtcgagcttgtgcaagcaaagccgattcggcgatagtgatggtaccgcggaaacgcaaggaagcggaaaggcgtgcagaacccctctctcgcaacccatttctccgactgcgcgttgctttcgcaccttcatcggtgctttccgcggcccctttattaccaatgcgacagaaagggccgatcatggcacaacagcaagctctcatcaccatcaccggatatgtgggtgccaatcccacgcaattcaacaaggatggcatgccccatgccagttcgttcagaatggcgagcaccagacggtatttcgacaatcgcacacagcaatggaaggatcttcccaccacatggatcacggtgaaagcgtaccggaacctatccgagaacatctgccaatctctgaagaaaggcgagccggttatcgtgatgggcgcgctcgccacggaaacgtgggccgatcagaacggcaaaccgcagtcacgcatagtgctggaagccagcgccgcagggcacgaccttaaccggggagtcaccacgttgcgtaagttcgtcaagccgaacgaccagcaccagccggaagcgaaaggaacggaaccgcgtgtgggagccgatccgttcgtcaggcagggcagtgtggcgccggtcgaaatcgtggttcccgaagatgacgaagccgccgaattctcgggagataccggggaattcgacggcgacatatattaggcggcaccgatgccttgcaggcttggctccgattgccagccgatgatgtggtttgttaccagatgcgcacgcgctgatcgggatcgagccacatgccgtcctccggcttcacgtcgaacgccttgtagaacagatccacgttgcgtgcgatgccgttcgtgcggcattcggcgggggagtgcgggtcgatctgcagatactgctccgccagctcgtcacgattcttggtgcgccagatggacgcgtagctgaggaagaaacgctgcaaaccggtgaaaccatcgatttccggcgcttcagacagcgaagcttcaatggactccgtggaaccgttcttctcacggcctgccgcctcgtcaagagcgaacgcatatgctttgagcgcaatgttcacgccactcaggtcgccgatgttctcgccgatggtcaaagcgccgttcacatgtggagcctgagctggatcgtcggcgtatttttcggcaagctgcgttggcacgaacgcgttgtactggtcgatgagtttctgcgtgagctgctcgaaattggccttgtcttcttcggtccaccagtcgttgagcttgccgtcgccgtcgtactgggcgccctgatcgtcgaagccgtggccgatctcatggccgatcaccgctccgataccgccatagttcgcggcgtcttcggcgttcgggtcgaagaacggtggctgcagaatggcggccgggaacacgatcacgttcatggtcggctcataataggcgttcaccgtctgcggattcatcagccattcgtccttgtcgacgctcttgccgactttggccagctgatagccggtctcatacaagttggcggcacgcatgttctcggcaaaaccggcattctcgtgcacatcaagcgcggaatagtcacgccaatggttcgtatagccgatcttcggcacgaacttggagagcttctccaacgccttctgcttggtttcttcgccaagccaggcggagttggaaatggacacgcggtaggcgtcgatcagattgccgaccagctgttccatacgctgcttcgacgactcggggaagtgcctcttcacatattcgcggccgacatcctcgccgcagatgccgttgaccagcgaaacgccgcgcttccaacgcacgcgctgctgcttctgaccagacaacgtcttgccatagaactcgaaattcgtctcatcgaattcgtgcggcaactccaaggtggagccgatgatcacatgcacgcgtgcccacagcttgagatcgtcgagatccgcggccttccagaatgcgttaagaccggtgaggaagctgggctcatgcaccaccacatggttgaaaatgcctcggaaatcaagcggctgcacctgagctgcggaagtctgatcatatgcggactgccaggattcgatccatgtgtcgagatcgtaatcggcgagcatggcgctcaattccgcataatcggtgggattataggtcttcaccgaatcacgggtggctacattgtcccaatggttcgcggcgatacgcgtctcaacatcgaggaaacgcttggcgtcggcttcggcctgctcgctatcggcggcaagcttcgcgttcttgagctgcttggccaccatatcgacgtacgcttcgcgaatcggcgcataatggtcttcacggtaatacgcctcatcgggcagacccaaaccggcctgctcaacatggatgatgttggtttcgggagcgcccggatcgccatacacggcaatgccgatcaggtcagggccgccagccgggttcatcgcgcccaaagagcgggtgagttcagccttgtcggcagcgacgtcaatagccttcaactggtcttcaatggcggcgagcccggaagcgttgatggcatcaacgtccaggaagcttgcatacagggcgtgggacttctcggcagggcagtcgtcgtcttcgagaatctcacgaatctggttttcggcatcttcagcgagcttatcgaacgaaccataacgggaacgatcatcaggaagacgatacatgtcgatccatgggccgttgacatagcggaacagatcttgcgcagggccggtcacggcggagaacgatgccggatcgatgcccgaattcaaagtggtactcatggcttcacactatccatctttggtgacaaaacagtgtatctgaaacgaataatcatcattccgcaacggcatgcataaggtgagatttgcataatcgtaagaaaagccagggagagccgagcactgtagggcgtacgaagtagggttagaggcatgattgaactgaaaacaccgaaagagatcgaagagatgaagcctgccggccgttttgtcggcggcattctgcgcgatctcaaggaatttaccaaagttggtaccaatctgctggaaatcgatgaattcgtgcacaagcgcatcgtcgatcgcaagggtgccgaatcctgctatgtcgactatgctccggatttcggtaccggcccgttcgcgcactatatttgcgtttccgtgaacgatgccgtactgcacggcgttccgttcgattacaacctgaaggacggcgatttggtcagcctcgatctggcgatcaacgtcgatggctgggttgccgattccgccatcagcttcgtggtcggcgagcataaggatcctgaggatctgcgcctgatcaagtgcaccgaagaggcgctcgcggccggtattgccgctgcgcagccgggcaaccgtttgggtgatgtttccgcggcagtcggcgatgtggcccgcgaatacggctatccgatcaatcttgaattcggcggccatggcgtcggccgtattatgcacggcgatccgcatgtgccgaacgatggccgcgcgcaccacggctacaagctgcgtccgggcctggtcatcgccatcgaaccgtggttcctcaagaccaccgacgaaatctaccaggatccgaaagatggttggacgctgaagagctccgacggttcccgtggcgcgcatagcgaacacaccatcgccatcaccgacaacggtccggtgatcctcaccgttcgcgacaagtgatcagacggtagcgtaaaacgcggcaaagctccaatacgacggagcgaagcgtacgaaaagaaggccgatgcccacgattattcgggcatcggccttttatatgcgtaatttcgcgcggaaatagtcgaattatttgccttgcaggaatgaagtatcggatgtcaatcgattgattttgagacgaaaccatgcttggaaacgcgcatgccatatagtgttcgatacttccgaacggttaaggagcgtgcaagtatggccacagccaatctgagtgtggaatccaaagacttcaccctgccggtggttgaagccacggcgggtgcggacggcatcgtggtgtccacgctgcgcaacgacggctgggtcacactcgaccctggtttcctgacgactgcgcaatgcgaatcgaaaatcacgtacatcgacggcaagaactcgatcctgcgctaccgcggatacccgatcgagcagttgtgtgagcaatccgatttccttgaggtcgcctggttgctgcgtcatggcgaactgccgaatcaggagcagtacgaccggttcatttccgacatcaaccatcgcacgatggtgggtgaggatttccgtaccttcatgggttctttcccacgcaccgcgcatccgatgagcgtgatggcatccgcggtcaacgcgctcgccaccttctatccggacactactgatatcaatgattccgaccagcttgacgaggctgcgaccatcattatggcaaaggcacgaaccatcgtcagctacattttccgccgtcgccgcgatgagccgatgctgtatccggattattcgcgcggctatgtcgacgatttcctgcgcatgtgctttgcggtgccgtacgagccgttcgattccgacccgctgtacgtgcatgcgctcggacgcctgctgatcattcatgccgatcatgagcagaactgctccacttccgtggtacgtatcgccggttccgcccacgccaacctgtattccgcggttgcggcgggcatcaacgcgctgtcgggcccattgcatggtggtgcgaatgaagcggtgctccgtcagctcaaagccattcgcgattcaggcaaaaccgtcaaggaattcgtggaagacgccaaaaccagcggtcagcgtatttccggactcggccaccgcgtgtataagtcgtacgatccgcgtgccgcgatcgccaagaagtatctgcagaagatcatggaacgcgcggacacgttgaaattgcctgccgacgagcgtgcgctgttcgacgtcgccacggaattggagaaaatcgcgctgaacgacgagtatttcgtgtcgcgtcacctgtatccgaatgtcgacttctacacgggattgatctaccgtgcgatcgggttcgatccgtccatgttcaccacattgtttgcattggggcgtattcccggttggatcgcgcagtatcgtgagatgcttgccgatccgaacaccaagatcggtcgtccgcgtcaggtgtacaccggttataccgaacgtgattacactccgatcgaccgtcgatagttgctttttcgctgtttcatggacttgtgatgctgttcgccaagccctgcggctaaagtattgcacggaaacatgcaagtaatgcaatcactgttgtgaaggagcgaagaatgaccgatcagcgcactgcgtggggttggggtctgtccagcgtggatgcggccggcaacactttggacgtatggtacccggaactgaagcttggcgaggctccggaggaggtggcacgcccgaaccataattttggcaatctcgcccatgagggcgtcgatgcgcgtggcgtgcgccgcattccggtgttcacggtgtcgaagcttgacgaaccgatcgaagacgcagccgacgcatacctgcgtctgcatctgctgagcatgcgtctcgccaagccgaacaccctgaatctggacggcattttcgcagccctcaacaatgtggtatggaccaattatggcccgttcgcggtcgaggatttcgcgctgcgcaagcttgacgtgatggccgcggctaaccagtgcgttccgggactgccgaaggttgacgtgaacgtgctgtcgatcgacaagttcccgcgcatggtcgactatgtggtgccgaccggcgtgcgtatcggcgacgccgaccgcgtgcgtttgggtgcccacctttccgaaggcaccaccgtcatgcatgccggcttcgtgaacttcaacgccggcacgctcggcgtttccatggtggaaggccgtgtttcccagggtgttgtggtcggcaacggttccgatatcggcggcggcgcatccatcatgggcaccctgtccggtggcggcaagcttaagaactccatcggcgagcactccctgcttggcgcgaacgcgggcatcggcatctccctcggcgacaactgcgtggttgaagccggtctgtatgtgaccgccggcaccaaggtgaccatctacgacaaggccaaggtcgcggcgggcgaaccgctcgaaaccgtcaagggcgccgatctttccggcaaagacaacatcctgttcatccgtaattccgtgtccggccgtatcgaagcgcgctatcgcaagaccggcatcgaattgaacgaaaaactgcacaagaactaaatatcaaatatgaaaatctccctcattaccgtcggcaaagtcaaggaacaatatctgcgcgacgccatcgccgaatattcgaaacgactcagccgatactgcaagcttgacatcgtcgaagtggccgacgagaaaacacccgagcatgccagtgagggagtggaacggcaaatcaaagccaaggaaggcgaacgcatcgccaagcatattcgcgacgatgcgttcgtcatcgcgcttgccatcgaaggccagcagctgaccagtgaagaacttgcgcagaaaatcgacggtcttggagtgcatggcaccagccatatccaactcatcatcggcggatcgctcggacttgacccaacgattgtgaaacgggccgactacctgctgagtttttccaaaatgacttttcctcatcaattaatgcgcgttattctgcttgaacagctgtatcgtgcatacaaaatcaatgccggcgaaccgtatcataaatgacgtgcaatcaatgtcgcgtaatgcgtacacaggtttcgcgaatatgatatggcaggattgcgatgcggcaaaatatggtgagatcgccgaaagataataagtagaaggccttgcctatactagtaccccgtgagtgactacagaagcgaacgcgagcagcgagaacgccgtcgccgcaccatggtgcgggcggtgtgcattgtcatcgctgcggcgatgctgctgagtctggttattcctgctatctacgcaggtctttgacgcctttggtccggtatgatcctccccggacctgcaatcccatacgtaacgagactggttcgcggctcggcaggatgggaacgagtatgtgggtacgtggaagaagctgaggattgtgcgaaagccgtatgaggctccatgacagaatataaagaacgcataaagaaatgtatggtgtaaacgatggcagaatttgatttttcccaggcaatcggcgaggcgcgcgccaaatacgagtcgatttccaaggcgcttgacgtcgaccgactgaccgcgcaggccaaagatcttgaagttcaggcggccgaaccgggattgtgggacaatcccgaaaacgcgcagaaagtgaccagcaaactgtcggcagtgcagtcccagctgaagcgtctcgcttccgcaagccagcgcatcgacgacgtcgaaacgttggtggaattgggtcaggaggaagaagacgccgacacgttggcggaagcgcagtccgaagtcgaaagcattcagaacgatctggccgacatggaaatccagaccctgctcgacggcgaatatgacgaacgttccgcagtggtgaccatccgctccggcgcgggcggtgtggatgccgccgacttcgctcagatgctgctgcgcatgtacctgcgttgggcggagcgcaatgggtataaggccaaggtcatggacacctcctacgccgaagaggcgggcatcaagtccgccaccttccaggtggatgccccttatgcgtatggtcgcatgagcgtggaaggcggcacccaccgtttggtgcgtatctccccgttcgacaaccaaggccgtcgccaaaccagcttcgcggcagtggaagtggtgccgctcgttgaggcgaccgatcacatcgacgtgcccgattccgaaatccgcgttgacacctactgctcctccggccctggcggtcagggcgtgaacaccacgtattccgcggtgcgtatcacccacattccgaccggcatcgtggtgaccatgcaggacgagcgctcgcagatccagaaccgtgccgctgccatggccgtgctgcagtcccgactgttggtgctgcgccacgaagaggaagccaagaagaagaaggagctcgccggcgatatcaaggccagctggggtgaccagatgcgttcctacgtgctgcatccgtaccagatggtcaaggatctgcgcaccggctatgagacttcgcagacccaggccgtgttcgacggcgatatcgacgcgttcattgaggccggcatccgttggcgtcatgagcagcgtcgcgcggcggccgaagaggcggacgcctaaaaaccacgattaccgtaatcagaacagcacatagtggaggggtacgacgatggcgctgatttcgcttgaacatgtgagcaaggtgtatccgaaaggcaccaggcctgccttggatgacatcaatctcgacattgatcgaggggatttcgtgttcctcgtgggcgcttcaggttccggcaaaaccacattgctgagcctgttgctgcgcgaggaggaggtcacggatggcgagattcgcgtcgcaggtaatgatttgaggcgcctgtcgtcaaggcaggtgccgcattaccgtcgttccatcggttttatcttccaggattacaaactcctcaacaacaaaacggtatgggagaatgtggcgttcgcgcttgaagtgattggcacaagccgttccaccgtcaaatcgttagtgccgaaagtgctgcagactgtcggtctcaccggtaaggaaaacaactatccgcacgagctttccggcggtgaggcacagcgtgtggccattgcgcgagcgtatgtgaaccatccgcagattctgctggccgacgagcctactggaaatctcgatccgaccacatcgctgggcatcatggaagtgctggacgccatcaaccgcactggcaccaccatcgtcatggcaacgcataacgaggaaatcgtcaactccatgcgcaagcgtgtggtcgaactgcataccggcaaaatcgtgcgtgacgagcagcagggatcctacgattccgcactgtacttcccggatgccgaagtcgaatccaaatcgcatcaggcgttgaacggcggcgacgtcgactcgaaatatcgtgcgccgggcgcgcttgaaatgtctgatttttccgatgaggcggtggacgtggaaggcgcgacgcgagccgaaaccgcggcgaacgcggttgatgccgtagctgcggccatccacagcggcaatggtgatgcgggcatcgcgcgtctcgccaattccgtgcattccggtcgcaccggtcgttatggcgaggcgttcgctccggtggagactacgctgacctggggcaagggactgaaacttgaggatcttgccgaacaggagcatgccgattcggctgcacgttcgcagaccgaagccaatgccgacgcgactggctcttcgcctgatacaggcatggaatcaagcaaagcggctgaaaacgagcaatccgcggagccaacggttcccgctcctccggcactgccgatgcctcccgctccgcccgcgcctccggctcctccggcagcgcccgccgcgactgccggtggcgaggcgaaatccgtcgaacaatccgatgaacagcatgaaacgtccgaaagcaaggagaacgactgatgcgtttgcgtttcattctttccgaaacctggagcagcctcaagcgcaacgtgcccatgttgctttcagtgatgctcgttacattcatctcgtttctgtttatcggcgcatcggtgctcactcaggcgcagatcaccaaagccaaaggcgattggtattccaaggttgaagtggtggtgtggatgtgtcccgatggcaccagccaatccgtgaactgcaccgcgggaaccgcggcaacgcagactcagatcaatgacttgcagaaaaccattcgcaacgagcttgccgatgatgtatcgcaaatcacttttgtaagcaaggaagatttctacaacgacactttcctcaaacaatatccgaacggtgaatatcaggggcgtacgctcactgccgacgatatgcaggattcattgtggctgaaactgaagaatcctgagaaatatcaagtcgtttccgaagtgctttctggcaaggagggcgtcgatactgtcagtgatcaacggcagatttttgagccggtgttcgcagtgctgaatcgtgcgaccattgcaaccgccgcattggccgcggtgatggtggtcgtcgccattatgctgaccggtaccacaattcgcatgtctgctgcgtcacgtcgaaccgaaacggagatcatgcgtttggtgggtgcttcgaattggaccattcggctgccattcattcttgaaggggcgatcgcatcaatggtcggctccttgctttcctgcgtcactttatcggcattggtgaaggtatttatcactgattggcttgcggcctccgtgaaatggattccatatgtgaatcagatgacggtattgtggatttcgccgattttggttgcaggagcggtgctgttgtcggtgattgcatccacagtgtcgttgcatagatatttgaaagcctgagaacattccgttttgtacggattggatacgtttatctgtgtcgcgttttaagcatgggatgctatggtatggaaccaatgatgggaggcaagtgaccgaatgacaagcaagaaagctctaaaaccggccgtcgcggtgtttgcaacgggggctttgtgcgccacgatggcgattgccccgttctcgtctgcggttccgcaggcgcaagccaatacatacagcaatctggtgaatgcccagaataagaaggctgccagctctcagcgtgaagcccagttgcgttcacagctttccggtgtgaagtctgatttggccgacaagatcgtcgagctggatgaattgacaaatacgaaaattcctgcagctcaagctgcagtcgatgaggcaaatgctactgccgcttcggcacagagtgaagctgatgctgcggcttcccgtttggaggccgcgcaaaaagataaggaaaacctcgaagcgcagatcgaacagaccggcaaggattatgatgacgcgcatgcggccgtggcacagatggctcgtgaagacctgcatggttccgatgcatccactgtgatgagcgtggtgacaggttccacgagcactcaggaattcattaattccatgcagtctcgtgatgcgttgagccgtaccgaagccaatgcggcaagtgatgcggcgaatacgttgaacacgtcgatgaaccgcagcgagcgtctttctgcaatcgagaagcagatcgccaatctgaaaaccgcagctgacgaaaaagccgcttccgcacagcaggctgctgcttccgcacagacccagcgcgactcgcttgaccagttgcgtgcagaaggcgaaacccgccgtgccgaattggaaagccaacagtcgcagctgaacggcagcgtggccaaacaggcggcgcaaacggttatgttgcagtcacaggtcgattccttcaaccgccagtatgcagccgagcaggccgcagcagctaatcaaaacaatggtggcaatcaagggcagacccggccaggcaacaacaataccaatagtggcggcaacaatgtgacgcctgctcctacgcctacgcctactcctacgcctgctcccgcgccgagtaccaataacaattccggtcagggaacctccaatggcgattacggcaatggctacgtggccggccagtgcacgtggtgggcgtacgaacgtcgtagacagatgggtatcggaaccccctcgtacttgggtaacggtggccagtggtacgctaccgcaccgtcgtatggtcttcgcgtggatcatagcccgcaggtcggtgcggcaatctccttcctgcccggtcaggctggtgccgatggcttctacggtcatgtgggtgtggtggaagcggtgaatggcaacaccatcaccatttccgaaatgaacgcggctggtggcccatatgtggtgtcgtaccgcacactgtacaacgcgtcccagttctggtatgtgcactgattcatcaagaagcgtttgagctttccttgagcgttgtgtcgcgggagcgcgccgcctgaatcgttgggcggcgcgctcccatgatattgtcgattgttgcgttgcagaacacttctttgaagaaccggaaaggaggtccgacatggccaaggagcaaggcgtgaagccgattgcgcaaaacaagaaggcacgccacgactatgccattgaagacaagtatgaagccggtctggtgttgaccggcactgaggtgaagtcgcttcgagaaggccgcgcatcgctggccgaatcgttcattaccatcgaccgtcgcggtgaaatgtggcttgagggagccaatattcccgaatatctcaacggaacgtggaacaatcatgcccctaagcgcaagcgtaagctgttgcttcacgcggcgcagatcgacaagctggctcgtcaaagccaggccaagggtttcaccatcattccgctgagcctgtatttcaaagacggtcgagtcaaggcggaaatcgcattggcacgaggcaagaaggaattcgacaagcgtcaggcattgcgcgaggagcaagacaagcgtgaggccttgcgtgccatgcgatatgccaacaagcaggtgcgataagtggtaaccggaaaatttccggtttcacatactgatatacagcggtggccgtaatctttttgtagcttgccctctctagtgtatggttcagattcggtcgaatagaccgagcgagacataggagaaggatatggaagcgaagaaaagtctgaaggcggttgccgcgtgtgcgctgagcgttgcgatgctgtttgctggagcggcatgcggcaccagtgatggaagcgacgatgcggcttcgtccgatagcggttcgaaagcgagcgaactgacgggttatgacgtttcgtcggtgcagaaagacgatgacatcgccaaactgttgcccgattatgtgacgaaggacggcaagctcaccatcggcatggacacgtcgtacgctcccgccgaattccttgcggaggacggcaagaccccggtcggcttcgatgtcgatatcgccaaggctttggcgcaggtgttcggccttgaagcggatccggaaaccgcgaatttcgattcgatcattccatcggtcggatccaagtacgatatcggcatttcgtcgttcaccgtgaccaaggaacgtttggaagcggttgatttcgtaagccattttgatgccggatcggcatgggccgtgaagaagggcaatccgaacaagatcgacacgtccgatctgtgcggcaagaaggtggccgtgcagaccgccaccatgcaggagaccgaagcgaacaagatagccaagcaatgcgaggccgacggcaaggataagcttgaagtgatctccagcaagctgcagaccgatgtgaccacgaacgttgtcaccggcaaggccgacgtgttctatgccgattcgccggttgcgggctatgccatcgcgcaaaccgatggacagctggaaatgctgggcaaggtcgaaggcgtcgctccggaaggcatcgtcatcaaaaaaggcgacagccagatggatgaggccgtacagaaggccgtgcagaagctcatcgacgacggtacgtatctgaagatccttaagtattggggtgtcgaggacggtgccatcgaaacgtcggaaatcaatacgccgggtgccgaataattccatgattgaaccgtccacggatcagacgattcaatgatcgcatgactggcgacgtgctgggaacaaagcgggttttgatcatattgtgatatggcaaaacccgctttttcgtaaggaaaaacggcatatcgaatagagtttgcgtactattaacgtggccgtagcaatcgttttctatggtgcctgcaggacttcggttcggccgtattcatacggttgggaatgaagagaggatccgcgatggctttcaataatctgaggaaactcgctgtttttgcactaagcgccgccatgatcgtttcgttgggtgcgtgcggcacatcggaaaagtccgattccgcggcttccagtgattctgagtcgttgtcgaacaccaccggttatgacgtttccggcgtgacgaaggatgacgatatagccgcgatgctgccggaatcagtcaccaaggacggcaagctcaccgtcggcatggacacgtcgtacgctcccgctgaattccttgcggaggatggcaagaccccggtcggcttcgatgttgatatcgcgaaggcgctcgccaatatgttcggtcttgaggtcgtgccgcaaacgtcgaatttcgattcgatcattccgtcgatcggcaccaagtacgatatcggcatttcgtcgttcaccatcacgcccgagcgtatggaagccgtcgatttcgtgagcatgttcaaggccggttccacgtgggtggtgaagaagggcaatccgaacaaggtcgccgcttccgacctgtgcggcttgaagatcgcggtgcagacgggcaccacgcaggaagaggaagtcaacgcggccgccaaacaatgcaaggccgacagcaagcccgaagtgcagattctgtcgaataagctgcagaccgatgtgaccacgaacgtggcgacgggcaaggccgacgtattctatgctgattcgccggtcgccggctatgccatcgcgcaaaccgaagatacgctagaagccctcggcgaggatgtcggcgtgaccaaggaggccgtggcaatcaaaaagggcgattccgataccgccaaggcggtgcaggccgcactgcagaagctcatggatgatggcacgtatatgaagatcctcaagcattggggcgtggagaacggagcgatcgacaaagccgaaatcaatccgactgacctcggctgaacgatcaaacgtaaggcaggcatcgcacacggcgatactgttaagccgatatgacggaaggcatgcgggtcaaatccgcgtgtcttccgttttcgtatatggatcttccgtgattcgacggagctacattgcgcgattcttggctgatacgtaaggtttgcgcaatgtaacgtacatgtagcattgcgctcttatcgtgcctatttgagatactgaggttctctgcaaccgaatggcgttgagattttcggtatggcaatgaagagataagaagaaggatatgcgtaccatgtctttgaagatcaagtccgttgtggcgcttgcgctgagtgcggcgatgttgtttcccactgccgcttgcggcacctccgatgcgtccaattccggcgattcgtcggattcgtcgaacactaccaccggttacgatgtcagcaccattaaaaaagatgacgagctggccaagctggttccgtccggcgatctggtgaaggacggcgagctttccgccggtatggagctttcgtacgctccggctgaattctatgccgaagacggcaagactccggtcggctatgatatcgacatgaccaaagccatcgccaagacgcttggtttgaagccaaacatcgtgtcttccatgttcgacaccatcattccttccattggctccaagtatgatctgggcatcaccgccatgaccatcactgaagagcgtatgcagtccgtggatttcgtgagctactaccgtgcaggttccacgtgggccgtgaagaagggcaatccgaagaagcttgacacttccgacatgtgcggcgcgaagatcgcggtgcagaccggcaccgtgcaggaagaggaagccaacaccatcgccaaaggatgcgaggccgataacaaggccgaagtgatgtcgtacaagcgtcaggccgaagcggccaccgcagtggctacgggcaaggccgatgcgttctatgccgattctccggtcgccggctatgccatctcccagaccgacggacagcttgaagccttgggtgacgtcgaaggtgtggccaagcagggcatcgctgtcaagaagggcaacacccagcttgctgaagccgtgcagaaggccgtacagaagctgatggacgatggtacgtatatgaagatcctcaagcattggggtgtggaatccggcgctctcgacaaggctgagatcaacccgaccgatctcgactgatttcatccccactatttacatcaacaacgaaggaactgaagcatcatggcgaagaaacaaatcgacggcgacggcctcaatattccgaatcgcatcaaggcgctgccggttaagcgtacgggcccgattgtggcggcggtcatcgtcgctctgctcgccgccatgctgctgcagggcctgattaccaatccgcgtttcgaatggaatgtggtctggaagtacctgttcaacgagaatgtgctcgaaggcatcaaatacacgctgctgctgacggtcatctccatgggcatcgccattattctggcagtgattctggccgtaatgcgcaagtccatcaatccggtgctgcgtggcgtgagctggttctacatttggttcttccgtggcacccctgtgtatacgcagctggtgttctggggtctgttcgccgtgttggtgcctcgcatcggcgtgggtattccgttcacttccattgaattctggagcattgactcgcagtccgtcattacggcgtttaacgcggcatggctaggtctcgcattgaacgaagcggcatatctggctgaaatcgtgcgtgcgggtcttgaagccgtcgatccgggccagaccgaagcggccaaggcactgggcatgaagcgttccatgatcatgcgtcgtgtggtgcttcctcaggccatgcgcatcatcattccgccgaccggcaacgagttcatcggcatgttgaagaccacttcgctggtcaacgccgtgccgttcacgctggaactgcagttcgccaccaccgcaatcgcaacccgactgtacaagccgattccgctgctgatcgtggcctgcatctggtacttggtgatcacctccattctgatggtgctgcagtctcgcctggagaagcatttcggcaagggcttcgatgcgcgcccggccggcgcgcgcggcaagcagccgccgctgccgggcaaaaccgaaggcgaaccgaaagacgatatcgccaagcagaacgaggcaacgttcgcgggcatgaccgcgtgaggggagtgagcaatgactgaaccaaccaccaacggtgttgttcccgcagtgaaggccacgcaggtgcataaggctttcggtagcctgcacgtgctcaagggcgtcgatatgacggttatgcccggctcggtgacggtgattctgggaccttccggttccggaaaatccacgttcctgcgtttgatcaaccagttggaaacgctgaccggcggcgaaatcgacgtcgacggcgaaatgatcggctacaagtacgtcgacaaggacggcaagcaggtgctgcagaccctgaacgacaaggaagtggccgagcagcgttccaaactgggcatggtattccagaggttcaacctgttcccgcacatgacggcgctcgaaaatgtgatggaagcgccagtccacgtcaagcacatggataaaaaggaagcccgcaagcttgccatcgaagagctgaatcgcgtgggcatgggcgatcgcctcgatcactatccggcacagctttccggtggccagcagcagcgcgtggccattgcccgtgcgcttgccatgaagccggaaatcatgctgttcgacgagccgacttccgcactcgatccggaattggtgggcgaagtgctgaacgtcatgctgtctttggcgaaagaaggcatgaccatggtggttgtcacccacgaaataggcttcgcgcgcgaagtcgccgatcagatcgtattcatggacggcggtgttgttgtggaacagggcggtcctgaaatcatcgacaatccgcaggaaccacgattcaaggacttcctgcagcacgtgctgtaaatcgccgcaagcataatcgtaagaatcagacacctcttcgtcgtaaggattgcgatcaagggaatggctgagaaaatccccatgttgaaaactgtcagcatggggatttttgtgttcatatatcaaaggttcagcgcgatgagacggtttcgtttcgaaaatgacaccattacccgataagctgaggtgttatgtgtggaatcgtaggatatgcaggaaatgtggaaaccgcgtgcggcaagccgttggaagtgtgcctccaaggcctccagcgtttggaataccgtggatatgattcggccggtgtggcgctgaccgcgcccggcatggatcatgtggaagtgcgtaagaaggcggggcgtctcgccaatctaatcgaagacgtggaacgcaatccaatgccgatggccaccgtgggcatcggccacacccgttgggccaccaacggcgtgccgaatgacatcaacgcgcatccgcatacttcgcgtgacggcaaggtcgccatcattcataatggcatcatcgaaaacgcctctcagctgcgtcttgatctgcagacggaaggttaccgtttctcatcggaaaccgatacggaggtcgcggcgaaactgctaggcaaaatcagcgagaaaatcgttgaggaaaccggcaagcctgatctgttcaaggccgtgcggcgcttggcgcgcatgctggaaggcgcgttcacgattctcgccaccgactgccgtcagccgggtatcgtggtcggtgctcgccatgattcgccgctggtggttggtcttggcgaaggtgagaattttctcggttccgatgtggccgcgttcgtcgcctacacgaagcgtgccatggaaatcgaccaggatcaggccgtgatggtgtccgccgataaggttgtggtgtctgatttcatgggcaacatcgtggccgatccgaagacctataccgtggattgggatgcttccgcggccgaaaagggcggttgggactccttcatggacaaggagatccacgaagggccggcggcggtgcagcgcacgctgttgggacgtcttggcaaggacggcaatctcaatcttgacgaggttcgcatcgacgagcatgatttcaaggcgatcgacaagattatcgtcatcgcctgcggtaccgccgcctacgcgggcatggtggccaaatacgccatcgagcattgggtgcgtattccggtggaagtggagcttgcccacgaattccgttatcgtgatccgattctcaccccgcgcacgttggtggtggccatttcgcagtccggtgaaaccatggacacgctgatggcattgcgtcacgcgcgtgagcagggttcgaaggtgctggccatctgcaacacgcagggcgcgtccattccgcgtgaatccgacgcggtgctgtacacgcacgctggtccggaagtggcggtcgcctccaccaaggcgttcgtggcgcagattactgccgcctacgtgcttggcttgtatttggcgcaggtcaagggcgcgatgttccgcgacgagatcgcgcaggcgttggattccctcaaagacatgcctcgcaagatccagtgggttcttgatacgcagaccaagaccgtgcatgatgctgccgcgcagatggtcgatgcgaagtccttcctgttcctgggtcgtcatgtcggctacccggtcgcgatggaaggcgcgttgaaattgaaggaaatcgcctacaccttcaccgaaggttttgcggccggcgagctcaagcacggtccgatcgcattggtggacgaaggcgaaccggtagtgttcatcgtgccgccggcgcgtggccgcaatgtgctgcacgccaaggttatttccggtatcgaagaggtcaaggcccgtggcgcgtacattatcgccgtggccgaagagaatgaccccgatgttgaacgctatgcggacgtggtgttctggcgtccggcctgcccgacgctgatgagcccgttggtggacgtggtgccgctgcagctattcgccatggacatggccaagctgaagaattacgacgttgacaagcctcgtaatctcgccaagtccgtcaccgtggagtaatcgttcatacgatgcgtcaacagcgtcagcagaagaggcatcgttacgttcttgaagaacctcatattccgttcgaatgtgaggttctttacgagaacgatgcgattatcgtggttgacaaaccgcattttctcgccaccacaccgcgcggcatgtggtatcgcgaaaccgcgttgattcgacttcgggaacagtatggcgaacctgatattgttcccgcgcaccgtttggaccgacttaccgcaggcatcatcgtatttgtgcgcaaaccggaattgcgcggcgcttaccaaatgctgttccagaatcgcaaaaccatcaaaacctatgaatgtttggcgccgcttgcccccgaacagcatccgcaatatggaacaatcgtaagaatcgacaggcatcaaccctttccggcaatccgagcatcgcatatttgcaaggatcgcgggcgacttcaggcgtacgaaattccggaaaccatcaatgcgcaaacgttgattgagcggggaagtacggtacgttgcctcgacggcaaagcatatgtgaattacgtgctgcacccgaaaaccggcaaaacgcaccagttgcgtgtgcatatgaattcgttgggattgccgattttgggcgatgatttctacccgaatattgtgcagcgttcttacgatgatttctcgcagccgttggaattagtggctcgtgagttacgtttcgacgatccggtgacgggagagcctcgtacattcgtttcgaaagtgccgcttggctgattaacggtctgatcagcaggtattgctcactgaatcaagatatataaaaactgtccatcgctgtactcatatttgctcgcttcgctatggcgtgttgaagttgcgcgtccctataattggacactttacatttcgtgttatcgagcgtgattaggatgtgctcttgttgtgctggctggcaaaggcaagccggctggaaagaacgagagagaatatgaaccatatttcaaaagcgcttcgtggcgttgccgacaaatataacggcgtatcactgattatccgcattatcgtcggtcttatcgcgggtaccgcactggcattggttgttccgcatatgacgtggatcggcgaattcggcaccctgttcgtaagcgcattgaaggccgtcgctccgattctggtgtttgtgctggtggcaagcgctttggctcaaggcaattccaagcttgacggccgtttcggcacggtgcttttcctgtatctgttcaccacgttcctgtccgccgtcgtggcggtgctgacgtctcgcatgttcccgcagaccatatcgttgggcgatgccgctgacgccgatgtggtgccgcagggcttgagcgaggttgtgcagacgttgttgaccaatatcgtggccaatccgattcaggccatgatcgacggcaactacatctgcattctgatgtgggcttgcctgttcggtcttgccatgaagggtattgccaatgaaagctccaaggcgttccttgccaatgtggccgatggtgtgtctcaggtgattcgttgggtcatcaatctcgccccgttcggcattatgggcttggtattcaccagcgtttccgaaaacggcttggcggccttcaccgagtacggtagcctcctgctcctgctcgtcggtaccatgctgctgatggtgctcgtgttcggtccgctggtcattttcctgtacctgcatcgcaacccgtatccgctggtgtaccgctgcttcaaggaatccggcctgaccgcattcttcacgcgttcttctgctgcgaacattccggtcaacatgcagctgtgcgagaagcttggtcttgataaagacatgtattccgtgtccattccgttgggcgcaaccatcaacatgaacggtgccgccatcaccatcaccatcatggccatggccgccgccaatacgatgggcattcagatttcgttgccggccgccattctgctgtctgtggtgtcggcgctcggcgcatgcggcgcttccggtgtggccggtggctcgctgctgcttattccaatggcctgctcgctgttcggcatcagcaatgacatcgccatgcaggtggtgggcgttggcttcatcatcggcgtcatccaggattccgtggagacctgtctgaattccgcttccgacgtggagtttgcggcaaccgccgaatatcatgcttggctcaagcagggccgtcagcttccggcgttcatgtattccaagaaggaacgtcagcagctcggcatcgaagcctgatttcacccgatttcagcttttcgttcaatctagaaggcgtctctcccacgtggttcacccacgctggagaggcgcctttcgtattggctgatttgattgattgcgttgattaaagtcgcgagatattgcgattagtcgagttccgccacggatccgcggtcgatgaattcgggggtgataagtttcttgattccagaaggcacttttttgccattgcattgttgctcgatcatggaaaaagcctcttttcccacagttctgagcttgagccgtatggtggtcagttcaagacggggcacaacgccgcggagtgaatcgtccacaccgatgatgctgacatcttcgggaacgcgctttcctgctgtcctcaggccaagcatggcaccgtatgccatttgatcgttgcctgcgaaaattgcggtgcaatccttttcgtgagccaaggccaatccggcttggtagccgctatctgcttcccagtcgccgtaatacatgggtggtgtgggaatgccgacttgcgctaatgcgtcgcgccaccctctgatgcggctctgtgctgcgcgtgaaacggtggggcctgcgatgtggtacacagttttatgccccttcgacaggaaaaagtccacggctgcagtggcgcaaccatacgagtccgaatcgatggtggggcagtggtttgccggttcctcgcaaataagcactacaggtaggttgtcggatggcttgaactggttgaagtcggtgaaatcgcgttccataatcacgattgcaccatcgagggggaggccttccacaagtttcagtgcgccggcgagtgactgatcctgcaggttatccaaggggcgaatggtgatggaatagccgctattcgcggccgctgtagcgatgccttcgaggatacgtgagttcccgtaggccgacatatgcgaaagcagtacaccaacattgttgaaatgtccgcttttcaaagcacgtgccgcataattcggcctgtatccgagatgctccatggctgcctcgaccttaagtttcgtcgctgggcgtacggcatcgctcccattagccactcgggaaacggtctgcggtgaaacccctgcttccctggcgacgtcttgcagcgagactgagttgcgtgccatgtgtatctaccttccgaacgaaaatgcgtactgtgcttaattttacatgcttacttctgtattgttttcgtcaccatgcaatttgttcgatgaagtgaatatgtggtctagaatgtgcgaaaagtagacacttttggaatatggtgttattatgataacgcaaacatttggaaggagctgttttacgggggtgtaaattgccctgtgaaatggtattgcctcgaaggagaggaatgatgtcagcaacggaagttgttgccaatatgccactgcattcggcaaccgtgcgtgtcaataaacacaaggcggattggcgcggttggaagttcatgtggccgttcgcgttggtgttcgtgttcgtgttcgtgatcccgatcctgtacgcgatctacatcagcttcttccagaagcagatgatcggcggcacgaagttcgtgggaatcagcaactacattcgcctgttccacgaccagcagttctggagctcggtcggcagggtcgcgctgttcacctgcgtgcaggtgccggtcatgctgttcctgtcggcggcgatggccctggcgttggattccatgaagctgcacggcgcgaagttcttccgcatctccacgttcctgccgtacgcggtgccggccgtggtgtcgactttggtgtggggcttcatgtatggcgcgaagtacggtctggtcggctccctgaacgactggctgggcacgaacctcgacgtgctgagcccgaacgtgctgctcgcttcgatcggcaacatcgtgacgtgggagttcacgggctacaacatgctgatcttctacagctcgctgtccacgatcccgcattcgctgtacgaggccgcctcgatcgacggggcgtccgagtggcagatcgtcaagtccatcaagctgccggaactgaagggctcgctcgcgatcacggtgatcttctcgatcatcggctcgttccagctgttcaacgagccgagcatcctgcagaacatggtgccgggcaactcgatcaccacgtactacacgccgaacatgtacgcgtacaacctgagcttcgcgggcaaccagtcgaactacgccgccgccctggcgatcacgatggccgtgatcacgatggcgatcgcgtacgcggtgcagctcaacagcatgaaggagcagatgaagtaacgcccggtggcgcgaaccatccgcatataggggaagaaacgctaaggagcatcgaaaatgagtgacgcaacaatcgccgcgggcacggagcagaggctcaccgctcaggagctcaaagcccaggagaaggccgcgaaaaagaccgagaaggaacgcctcaagagggtcgcgcgcgacgagaaggccgagcgcaagagggctgcgaagtccggcttcgcgaacgtggcgaacccgcgcaggagcacgctgctgaccatcgtgtgcgcgctgttcgcggtgtactgcctgttcccgttcgtgtacctgctgatcaacgccacgaagacgcaggcggacttcacgtccacgttcggtctgggcttcggccgcacgttcgctttgtgggacaacatcaagaccgtgttcacctaccaggacggcatcttcggacgctggttcctgaacacgatcctgtacgtggtcgtgggcgccggcggcgcgaccctgctcgccatcatgggcgggtacggcctggcgaagttccgtttcccgggacgcaaggccgtgttcgcggtgatcatcggcgccatctcggtgccgggcatcgccctggccgtgccgcagttcctgctgttcgccaagctgaacctgacgaacaccccgtgggccatgatcatcccgagcctggtgtcgacgttcggcctgtacctgatgtggatcttctccgaccaggccgtgccgaccgagctgctcgaagccgcccgcgtggacggcgccggcgagttccgcacgttcttccaggtatccctgccgctgctcgccccggggatcgtgacgacggccctgttcacgatcgtggcgacgtggaacaactacttcctgccgttgatcatgctgaaggattcgaactggtatccgctcacgatcggtctgaaccagtggaaggaccaggcgagcaccgcgggcggccaggcgatccagaacctggtggtcacgggttcgttgatcacgatcgtcccgttggtcatcgcgttcctgtgcctgcagaagtactggcagtccggccttgccgcaggcgccgtcaaggaatgaatttgttaggatagttgacaaaaaaacaaaggagtggatatgactcaacgtagagcctatcgttggccgcagccgttggctggacagcaggaacgcatctggtacggaggtgactacaacccggaccagtggcccgaggaagtgtgggacgatgacgttcgtctgatgaagaaggctggcgtgaacctcgtgtccgtgggcatcttctcgtgggcgaagatcgagacgagcgagggcgtgtacgatttcgactggctcgaccgcatcatcgacaagctgggcgaggccggtatcgccgtggacttggcgtccgccaccgcgtcgccgccgatgtggctcacccaggcgcatcccgaggtgctgtggaaggactaccgcggcgacgtgtgccagccgggcgcccgccagcattggaggccgaccagtccggtgttccgcgagtacgcgctgaagctgtgccgtgcgatggccgagcattacaagggcaacccgtatgtggtcgcatggcatgtgagcaacgagtacggctgccacaaccgtttcgactattccgaggacgccgaacatgcgttccagcagtggtgcgaggaacgctacggcaccatcgacgcggtgaacgacgcgtggggcacggcgttctgggcacagcgcatgaacgacttcagtgagatcgtgcctccgcgcttcatcggcgacggcaacttcatgaacccgggcaagctgctcgacttcaagcggttcagctcggacgcgttgaaggcgttctacatcgccgagcgcgacacgcttgccgagatcacgccggatctgcccctgaccacgaacttcatggtgtccgcgtccggttcggtgttggactacgacgattggggcgacgaggtcgatttcgtgtcgaacgaccattacttcattccgggcgaggcccacttggacgagctcgcgttctccgcgagcctggtcgacggcatcgcacgcaaggatccgtggttcctgatggagcattccaccagcgcggtcaactggcgtgagatcaactaccgcaaggagcccggccagctggtgcgcgactctttggctcatgtggccatgggtgcggacgcggtgtgctacttccagtggaggcagtccaaggcaggcgcggagaagttccattccgcgatggtgccccacgcgggcgaggattccgccgtgttccgcgacgtgtgcgagctgggcgccgatctgaacaaactgtccgacgagggcattctgggatcgaggctcgcgaagtcccgtgtggccgtggtattcgactacgagtccgaatgggccaccgaacacaccgccacgccgacccagcacgtgcatcacgtggacgagccattggcgtggttccgcgctttggccgatcagggtgtgaccgccgacgtggtgccggtgcgcggcgcctgggatgactatgagatggtcgtattgccgagcgtatacctgctttccgaggaaacgacccgcagggtgcgcgattacgtcgtgggcggcggtcgactggtcgtgacctactacacgggcatctcggacgagaaggaccacgtgtggctcggcgggtatccgggctcgatccgtgacgtggtcggcgtgcgcgtggaggaattcatgcccatgggcgacgatttcacgggcgtgccggatcgcctcgagttgtcgaacggcgcggtcgcgcacgatatcgccgacgtgatcggctcggtcgacgggacggccaccgtgctggaaacgttcaaggacgatccgtggaccggcatggacggcgctccggcgatcgtcgcgcacacgttcggcgaaggtcgcagcgtgtacgtgggcgcgcgcctcgggcgggacggcatcgcgttgagcctgccggaaattcttgattcgctcggcatggccgaagcgggcggaaacgacggccgagtgctgcacgtcgaacgtgagggcgcggacggttcgaggttcgtgttctcgttcaaccgcacgcatgagacggtccgggttccggtggaaggcgaagtcgtggtctcctcgttcgcggacgtggacggcgaaacggcctcgattaaaccgaacggcgtgatcgtcactaagcagtaagcggacagcaagcaaataatcgcaacattatgggtgtcggcaggttgatgattgtcaatctgccgacacccatttaatttatactattcgaataaaaactaggcgtggaattccactgcagcccaactgattgctggcaaagtgcagtgaactgatccattgtcgattgttgcatgaagctcttggggtgtcactgcggttgggtcgtctgcggaattacgctgatatggattgtcgtcatgcagaataatggccttgtctatatggaagtcggatatgtcgaaatacggcagttgagacagagaagccgtaaccttatgtgcgtcggatgcgtcgcgattcaccataagcagaagaccggaatgattcgtttcgtcccaagtgattactgaatcaagggcattgaccaagccgaaagattcagtctctacgttgggagagtcgatgactggactgtaggcaatgccatgggcgtgttgtgcggcttcggcaaacggatagaagacagtttgacgccatgcgggaccgttcttttcggccatgattggcgcaatcacattgaccaactgcgcgcgcgaggcagaacgcactcggtcgcagtgcttaagcagagtgatcatcagcgacccttctaccactgcatcggctgcattgtagatatcttcgagcagacgcggtgctttcggccatgactcatgatgaagatccttgcctgattgggctttccattcagcttcctgctgattccagacgtcggagtaccagacgccccactcatcaaatgacagtgctatatcatgatcgcctgtgtgggcatttttggcttcgtctgcacatgccgccacggtggagatgaacgtttgcatgtcttgtgaacttgccagataatcttgcaacgattttgccccacgttcgtagtagtaggcatggcaggagacgaaatcgagattgtcgtacgctttggtaagcacgctgcgttcccaggatccaaacgttggcatatgggcgctggaggagccgcaggccacgagttccaagcctgattccgcgagtttcatggcgtgtgcgactcggtccacggctgcggcatactcgtcagggctcatatgtcccacctgccaagggccatccatttcattgccgatgcaccacattttgatgtccattggttcggtgattccgttacgtacgcggcgatcggcaagctcggtgccgggcgctccgttgacgtattccaactcttccagtgcggccttcaatcctcgggtgcccatattgacggcaagcatgatttcggtaccggtcttcttgctccatcggtagaaatcgtcgataccgacttcattggtttcggtgctgtgccatgcgagatctcgtcgtattgggcgttgcccccgtggccctgtgccatcctcccaattgtaggcagagacgaaattgccgccggggtaacgcacgcaggtcacaccaagttctttgactagattgatgacgtcttggcggaatccgttttcgtcggctgtggggtgacttggctcataaatgcctccgtagacacaacgtccaagatgttctacaaatgatccgaaaatgcggggtggtatatcggcaattgcgctgtttttttgcactgtgattgtgctggttccggaagtcatgccgttcctttcgatgagtggtctgatgaaatgtctgcgttgcgcgagcttcgacggatatgcatacgtctagtatgcaatcatatcgtgtttgcgtagctaaacaaaatatgctaggtaactaaagaaatactgtaaaatcaacgatttgcctatttgtttgcgtaaacataacttttgtgttatcctcatgactgtcggaagcgtcaatgaatgattcatagccgataatgttggtcgatgtaggaggtcggccatatttaaaggaaggaagaacgatgaagttcactgcatccaagaaaacaatcgctctggttgctgctgctgcgatgctgactagtgtcgcagcctgcgggagttcctcgaattcgagttcttcgggggtgacagagggtggtaagactgaaattacggtatggtcttgggattccactttgccgcgtaccgtgaaggattttgaaaaggccaatccggacatcactgttaaggtgaccaatgccggcacgaacaagaccgaatacacggctttgaacaatgcgctttctgcaggtaaaggtgcgccagatttggtgcagattgagtattatgcacttcccgaatatcaggttcgtggagagattgaagacctgagtcagtttggtgcggacaagttctcggatttctatacgccgggcacgtgggcttctgtgaaacttaatggcggtgtgtatgcactgccgatggattccggaccgatggcatggttctataacaaggatgtgtttgataaggccggggtcgatccgactcgggtgaggacgtgggatgagttctacgatgctgccaagaaggttcgcgcaacagggtcctacattacgtccgattctggtgatgctggcttcttcgattccatgacatggctggcgggcgcgacgccgttctccactggttccgatggacagtccgtcaccatcaacctcagcaatgattccaaggtcaagacttttgttgatttctggcagaagatgattgatgatgatcttatcgataccaagaccgcaggctggagtgatgattggaacaagagtttgaatgacggctctatcgcttcgctgctgaccggtgcttggatgccgtacaacttgctttccggtgctcctgacggtgaggggaagtggcgtgttgctcagatgccgactccggatggatctgaaaccaattccgagaacggtggttcttcgctggcgatggtcaagacggatgacaaggccaaggccgaagctgcatacaagttcgctgaatatgcgtgccacaatgccgaaggcatcaagactcgcgtcgctggcggcgcattccctgccgataacgacactctcgcttctgatgacttcctgaacatgacctctctgactgattccgatggcaatgcgcacgaatacttcggtggtcagaagttcaatgaggagctcgccaaggctgcggccaatgtttcgactggctacaagttcctgccgttcgaggtttatgcgcgtggcgtatatagcgatgatgccggtggtgcatataccgacaagtccgtcacccttgctgaaggtgttcaggcttgggaaaagaatatcaaggattatgcatctcagcagggctacaccgtgaagtagctgcatgattccatagtggaatcggtaaatatgagcgtctgtggattgagggattgtcaatcggcggacgcttttttgagctatcagtggattgcgtggctgaatcgaagagattggaggattgtacgctggctttcgggtgactgacgtacactcgaatgcgtatgtctgtacgtacgttttcgtgtgggaacatcaaacggaaggaatcggcttgaaactggtgaaacgactcatcgccatctgctgtgcggccattatggcagtcggtgcggccgcttgcggagccaacgtcgattcccgcaccgaaatcaccgtgtggtcgtgggaaccgagcatgaaacaggtcattgccagcttcgaaaaggaaaaccccgacatccacgttatttggaagaacacaagcggttacgacaatctcaacaacgccattcaagacggttacggcattcccgacgtggtgcaattggaatactatgcgttgcgccagtacgcggtaagcggccagctggtggcgatcaccgggcgtacggaaggctacggcgatttctacacgcccggtacgtgggcttcggtgcagctgaacggccgcgtgtacggccttcccatggattccggtccaatggcgttcttctacaacgacagcgtgttcgagcaggtaggcatcgatgcctccaagattcgcacgtgggacgactattacgaggcggccaaaaagctgaaaggcatcggcgtgtacatcgcagccgattcgggtgacgccagcttctacgacacgatgatctggcttgccggaggccgtccgttctccacctccaacgacggcaaaaacgtgacgatcgacctcaccgacgatgagggtacgagaaccttcaccgaattctggcagaaaatgatcgacgaaggtttggtcgccaccaatctgaccacatggtccgatgggtggaaggaagccgtgggggaggggaagatcgcctccatgttctccggtgcttggctgccgtcgctgctcatgtcgaaccttcccggaaccgcgggtttgtggcgtgtggcacagatgcccacgccggatggcagttataccacgtcggaaaacggcggttcggcgctggctgtgttgcagcgttcgcgcaagcccgaagcgtcatatcgtttcatcgaatacgcatgccataacgcggaaggcatcaaagcccgtgtggacggcggtgcgttccccgccgataacatcacgttgtctgatcgggaattcctgcgcaaaaccaccgtgaccgacgaacgtggcattgaaatcccgtatttcggcggtcaggaatacaatcgcgtgctttcccaagccgcggaaaacgtgtcgaccggttaccagtatctgccgtttgaagtgtatgcgcgaagcgacttccgcactaccgtaggcaaggcctacaaatggtcgagccggttgcgcaaagagcaggacaggctgaatatcatcgcggccggtggcaaagtgtccgacaaatccgccatcggcgacgcgttgaaggaaactgattccgctgatcgtctcaaattgaaaagcggtattgcgctgtggcagaaggatttgaaggaatatggagccaatcagggctttactattcagtaaatagttaattatttgctatagttgtaaaaataatgatggctgtcttgtttttcttttgaattcaagacagccattatttttatatattgagattgtatgttgacgaaaagttattgtcgaatattgcgttcgtaaatatgcagcatgcctttgaaaatcagatcagggtcataaatgtcgatcatgtcggtatcgtcggcgaacacgcggcttaatccgcccgtcgcaaccacgcggaaatcctcgtcgatttcacgatggaattgcgcgatcgtacgttcgatgccgccaaggaagttgtaatacaggccggcctgcatggctggcttggtgcttttcgccagaatcgacgaggggcgcgtgatctccacttccggcaactgggccgtggcatcccacaaggcggccgcgcctgtgcgaatgccggtggtgatgagcccgcaaatcaccgacgcatcggcggtcacatagttgaatgtggtggccgtgccgaaatccgccaccagaatcggcccgccatactcgtagtaggctcccgcacagtcggcaatgcagtccgcgcccatattctgcggattgtccatgcgaatattgatgccggttttgactcccggtccaacaatcatcggatcgatattgaggaatttcacaatgctggcacggaacgaatgcatgaccttcggcaccaccgacgtgatgatcacatcgtccacatcgcccggcgcatagccgctcagccgcaggaattgcgtgatcatcaggccatattcatccgacgtgtggttcgccttcgtggtgatgcgatacgtgccggcgatatgcccgtcatcgagaaagccgatcaccacattggtgttgccgatgtcgactgcgaccagaagcatgtcgaattctccttacgattgctgtattgacgctatttcctgtgatgttggttgatggttacgatgcttgcgattcagcggattcggtattgcgcaacgctgccaattcggtgaggatgcgttccgccaattcctgcttgctcatcttgttccaatgctcgatgatcggttcgtcggtggtttcgccgggtttcagcacggtcaccacattcgtatccaccgcgaatccggcgccgggagtgttgagattgttggccaccagcatggaacaatgcttggatgtgagttttttcgctgcgttcgattcaagatcctgcgtttccatggcgaaaccgcacaaggtttgaccggcggttttatgcgcgcctgcccatgcgagaatatcgggattcgaagtgagccgcagatcgatattgacgcgcccgttcttcttgattttctccgaagactgctcaatcgggcggaaatcgccgacggcagcggccataatcgtcaaatcggcctgcgtgaaatgctcttgcaccgcgttgaacatttgctgcgcggtggtgacgtgaaccgtatcaatgccgcggggagcgctcaatgtgacagggccggataccagcgtcacatccgcgcccatatcgcgtgcctgctcggcgatcgcatagcccatttttccagtggaatgattggtgaggtagcgcacgggatcaagtggctcctgtgtggggccggcggtgacgagcacatgcaatccgtgcaatggcaacgtttctgcgggctggttcgcacgcagcagatcagctacggcagcttcgatcgcagcaggctcctccatgcgccccttgccaacatcctggcaggcaagcataccggatcccggctccacaatggtccatccgagttcacggcaggcattgagattgcgttgcgtcacggcattctcatacatgtgcacgttcatggcagggcataggattttcggtccctcgctataggcaatcacggtacttgtcagctggtcgtcggcaatgccgcatgcgattttcgcaatgatatcggcgctcgcaggagcgatgacgagcatgtccgcccatttcgcatcatccacgtgattgatatgcagcggatcggatggcgtatgcgcaacatcgccgtcattgcgctgtgctgcgaacatggacgtgcgcgtctgcgtatgcgtgagcgagctgaacgtcaacggggtgacgaactcctgcgcggccgcggtcatggccacgcgaacctcatgtccctgcttgctccagtcggaggcgagatggcaggccttgaatgcggcgatgctgccggtcacgccgagaagaatatgcgccatagccgatattgtccttcccttgacgttggcaagacttacgaaaactgcgtcaagtatatatcgaaccggctgaggcatgcggcattgcggcattgccgtcagatgaatcctgcgggcatggcggattgtagaatcagactttggtgatcgacccgtacaggcggtcaaccagaacaaacacataatcaaacaggagcaatcatgtcgcaatcttcaggtgcgtacggcgaagccgacgcaaccgaacagaagaacgaacaacacaacaatcagcccgcaaactcggcaagcaccgacgcaactttgaacgcgcgtgccaaatcaccgaaatccaaggggcccaacaagtggatcatcgccatcattgcagtgatcgcagtggtcgccatcattgtgggcgtcgtcgtgttccgtaacaacaacgcatccagcgataccgcggaaaatggcacctccaacaccgtgaccattggactgaaactcgcccccgtaagtctcgacattcgccaccagtccggatcggcgatcgaacaggtgctgatcggcaatgtgtacgaaggactgctgtcgcgcgattccgacaacaaagtgcagccgggactggcgaaaagctgggatatttccaacgacggcacaacgtatacgttccatctcaacgagaacatgaacttctccaacggagacacgttggacgccgaagatgtggcctggtccattaaccagctcaaagaacagcagtattacaacgccaatcaggtcgaaagcctcgaaaaagccgaagcggtcgatagcgacaccgtgaagctcacgctcagcacccccgattccaacctgctgtggtacctgaccggacgccccggcctggtgttcgataaggacgccgaatacaacgcgaaaaccgaagccgtcggatcgggcccgtacacggtggaatccttcgattccgccagcaaaatggcgctcaaagccaacccgaagtattggggaagcgcacacaaggccgcaaccgaaaacgtgatcatcaaattcctcaccgacgataacgcagccgtcaacgcgctgaaaagcggcgaagtcgacgtgctttccccggtgaacgccacgctcgccaaatcgcttgacaccaacacgtatcaggtgtccgcggcggacggcagcgacaaatacgtgctcgccttcaactgcgcgaacagcaagcttgccgacaagcgcgtgcgtcaggcaatccgttacggcatcaaccatgaggaaatcatcgcttcgcgcggtaacgtcgactatgcgctcggcgggccgatcccatccgtggacccgggctatgaggacttgaccgacctgtacccgtacgatgtgaacaaagccaaggaactcatggctgaagccggctattccaccgataatccgctgaaactcaccctcacctacgccaacacgtacggcacggaactcggcgaccaactgcgtagccagctcgccaaaatcggcattgatctcaacatcaactacgtggaattctccacatggctgcaagacgtgcacgccaacggcgactatgaactttcgttggtggaccacgccgaaagccacgacttctacaagtggaccacgcccgactactacttccactacgacggcaagcaagcccaagaactgtatgccaaggcgctcgccgccaccgatgaggaatccagcgcaaactatttgaagcaggctgcgaaagcagtaagcgaggatgcccccgccgactggctgttcggctatcgtgtgacggtggcataccacaagaacgtgcagggattccccagcaagctgagccagacggtgctgccattgtggcagatcaccaaggcgcggtgaatcgacgaaaaacgatggaaaatcggcggaaaacaagtgatgaaaactgatgtgtggcggtgtttgcagcggcatcgttgcggcaccgccacacgttggcgcgatattgttggatagggtaatgacggtgaataggtgcgtatcgctgcaaacgcacggatcgagcgatagaccaatggtggttcaactatgagatttgtagtcaaacggctgggactgttcgtcgtggccctgttcggtctgtcgcttctggtgttcgtgctgttgcgcatgctgccgggcgatgtggctgcggtgatcgcaggaacgaacgcagcccctgaacgtatcgcgtcgcttcgtaccgaacttggcttggacaaatcgtacgtggcacaatacggcgattggatgctgggattgctgcatggcgatcttggtgtgtccaccatcggaggcaaagcggtgtcggcacaggttgcgtctcgtgcttcggtaacgtttccactgatcatcgtgagtttgctgatcgcattggcgatcggcctgccgcttggttgcgctgctgtgctgacccgtaatgcccgcttgcgtgggctttgtcacggtattgcgattgttgccggcgccattcccgcattatggggcgggttgctgttgattctgctgttctcacgcggttcaggactgttgggattgctgcctgctcaaggttttcccgataatggctggggcgcgcccttgcaggcgttggcttctttgatacttccggcgctcgccaccggcgttaccgcaggcgcgtccattatgcgttacacgcgtgccgccgtgggggacaaggcctcgtctcaggcggtcgacatggccatggcatgcggcatgacccgcaaacaggcggtattgcgcgtcgctttgcgtcttgccacaccgcaattggtgtcggtgatcggtttgacgttcgcccagatggtcaccggtgtaatggtggttgagaatctgttcgcgcttccggggcttggcaccatgctggtcaccgatgttggcaatcgagatctgattgcagtgcagagcgaattgttcctgttggctgcgttcttcctcttgcttggattagtggttgatgtggtgcatcgtgcgcttgatccgcgtctgaaagatgccggattggtgtcgggggaggtgcttgcatgatgaaacagtctgctgagaaaactacttcgaaaaacgctgtgaaaaccgtgatttcctccatatggcgtaccgctggtggcaagtattcgctgatcatgcttgcgatatggctggttgtgtcggctatttcgctggtgtggacgccatattcgctgcttgatactgacggattcaacacgtgggcttcgccgtccggcgctcacatgttgggtactgatggtgttggcgctgatgtgttgagctggctgatggccggttcccgtacgaatcttgcgatcgcactgcttaccgtggtggttgccgcggccatcggcctgctgctggtggcggccatggtgtctcgccatggcgcattggcttccacgtcggtggttgtggtggatgcgttgatttccattccaacagtgctgatcgccttgatgctttccgtgctgttcggcgcgtcggcagcggtgatcatcgccgcatgcggacttgcatacgggctgaatttggcgcgtattctacgccccgcggccatgctcgccgcacgttctgaccatgtggaatcggctttgtggtcgggtgcgagttcgttacgcgtgtttttcacgcatattgtgccgaatacggttccggtgttatgcgttcagctgtcgatgagtgcgggcacgtcgctcttggcggaggctggattgacgtatctgggtgttggcgtcggtgcgggagtgcccagttggggacattcgcttgccacgtccgtgaaattcatcagcatttatccgatggctgtggtgtggccgggattggtggtcaccttgatggtgatagcgctgaatctgtttggcgatgcgttgcgtgacgccatcgatccgctgatgaatccggcattgcggcaaggtgaagccacccatgttgaatcggaggaacgcgcatgagcgtcagcatccgtaatctcaatatcgtcatcaatggaatgccgattgtgcatgatgtcgatatggacatcgccgacggtgaacgtgtcggtttgatcggttcgtccggttccggcaaatccatgatcgccaaatccatcatgggcttgctgccgctttccgcacaggtttccggcagtattgacatgggtggtactgaaatcgtcggagcgtcggatcaagcgatcgccgatctgcgtggccgttatgtgggcatggtgttccagaatccttccgccgcattgaatccggtgatgaccgtggcgcagcaggtcgcgctgccactgcgtttgcattacgatctgacccgtgacgaacggttggaccgtgtcaaagcaatgttcgccaaagtcaggctgccggaagatgtgctgaacaaatatccgcatgaactttccggcggacaacagcagcgcgtcggcatcgcggccgcattggtcacgtcgccgcgcctgattatcgccgacgagccaaccaccgcgctggattcgatcacgcaacggcagatcgtcgatctgctggcatcgttggtggacgattccggcgcatccatgctcttcatcacccacgatttcgcggtactcaatcatgcaaccacacgctgttatgtacttgctgatggacgtgttgccgaatcaggacaaaccgccgatatcctgcagtcgccgcacactaaagtcgcttcgcaattggtgacttcggcacgtgcgctgtcgttgcggatcgatgccgaaaccaaataaggagaacggttgtgacgggcgaaaacgaaaaaaccacaatgctgcaaggtcgcggcatcagcaaatactacggtgcgaaacaacagcgtcgtcaggtgctgcacgatgttgatatcgacgtacgttcgggggagtgccttgcggtgatcggcggatccggatccggcaaaaccacccttacacgagtattgctggggctcgaacacgctgaaacgggcgagattacgtatttcggcaagcctgtgcaaggcgaagtcgccggcgaactgcggcgtagctgcggattggtgttccaaagcccattcggctcgttggatccgcgttggagggtcggcagatccgttgccgaaccattgcggttgcatcaccctgattggtcgcaggaacggattgcggaacgcgtgtcggaagccttccgcatggtgagtctcgaccctgccgcatatgaaaatcggttccccgtggacctctctggcggtcaggcgcaacgcgtggccatcgcacgtgccattgcggatcatccgaaagtattgcttgccgacgagccgatgagcgccgtcgacgtggccgcacgaacgcagattctcgcatcgttcgctgcgattcgtagcggcgaacctgatatgtcgctgatcatggtgtcacacgatttgggagtggtgcagcatatcgcagatcgtattatggtgttgcacgacggttgcgttgaggaatgcggacttacggaaaccgtgttgcaccatccgaccagcgattacaccaaacgattgctggacgcggcttcgctctgatttgtgacactgcgcaaaaagcctgcgatcatgttgaaatccgcatgattgcaggcttttttgccgctatatgaacaggtaagacacgccgatgtcgttacgtgtgctattgtgtgagccatgttcaatttctcttgttgttgctgtcgctgaccaaccgcccgaggggcgcgtggttcatcgaagcataacttgagacagggcattctttttcggcatacgcaacttgcgttgcatgccagagtatcgcagaaatcatcccataaccagtgccttacgcggttggtattacgcggcatatgcggatgaaccgcagcgaaaacaccatcacaggtcccgtttcaaatcattgcaagtgataaacgcgagcttctcgaaatcaaaacaacgaaatcattcatcggaagccaacggaaatcactcttcgcaaggaaacgacatgaccatccacaactccctttccgagctcatcggcaacactccgctcgtcaaactcaaccatgtgaccgacggcatcaaagccaccatcgcagtcaaagtcgaatatttcaatcctggcggctcctccaaagaccgcattgcggaacgcatcatcgacgcggccgaacgcagcggcgaactcaagccgggcggtgtgattgtggaaccgacctccggcaacaccggcgtaggacttgccctcgtggcccagcagcgcggataccgcaccatcttcaccctgccagacaaggtttccgaagccaagcgtgcggtactccgcgcatacggtgcagaagtggtggtaacccctaccgatgctggtccggatgatccgcgctcctactaccaggtggcggaacgcctcgccaaagcgattcccggcggataccgcccgaaccaatacgacaacccgaacggaccggaaagccactaccgcaccaccggtccggaaatctgggaagccagcgaccatcaggtcacgcatttcgtggctggcatcggcactggcggcaccatttccggcaccggacgctacctgaaggaagcttccgacggcgcagtacaagtgatcggcgccgacccggaaggatccatctattccaatccgaacgacgtgcatcagtacagcatcgaaggcgtgggcgaggatttctatccgaaagcgttcgaccgtgaacttcccgacgaaatcgtgcaggtcaacgatgccgaagcattcgaaatgacccgccgtttggctgcggaagaaggtctgctggtcggaggctcgtccggcatggccgttacggcagcgcttaaatacgcacgcgagcacgatttggacgaagaccagctggtcgtggtgttgctgccggattccggtcgcagctatatggaaaagatcttcaacgacgattggatgcgtgccaacggattcgccgacgttgtggaacgcgcgtccaagccaagtcttgcggagcggtatctgtagaccaccgatcagctgtttcacgatcatgcccatcattcgttcaacccaaaccattcgatattttcaaggagttcccatcatgaccatctcgaccaacaccgaagccctgaacgccactgcactcgccacccgcgccattcacgcaggtcaggagcccgatccgaccaccggagccgtggtcactcctatttatatgacgtccacgttcaagcaggatggtgtcggcggcctgcgcaacggttatgattacagccgttccatcaatccgacccgcaactctttcgacgagcagctcgccgcggtcgaaggcgcgaactacgcgctgagtttcgcttccggactggccgccatcgacgtgctgttgcgtgccaccctcaagccgggcgacaatattctgctgggcaatgacgtatatggtggcacctaccgtttgctttccaaggtgttcgtgccgtggggcgtcggtcttgacgtggtggacatcaccgacacggcggccgtttccgtggcgctcagccagaagcagtaccggtacatttgggtggaaaccccgtcgaatccgctgctcaacatcactgatatcgcggccacgtcagcggtcgctcatgcgcatggccccaaagtggtggtggacaacaccttcgcatccccggtattgcagcatccgttgtcggatggcgccgacgtggtcgtatattccaccaccaaatacatcggcggccattccgacgtggtcggcggagcggtggtgctcaacgacagggaaatccgcgatgaagtggcgttcctgcagaacgcggccggagctgtgccatctccgttcgactcctggcttgacattcgtggccttaaaacgttggatctgcgcgtcaagcagcacagtcgtaacgccatgaaggtggcgcaatggttagaaacccgccctgaagtggaacgcgtatggtacccgggactggaatcccatccaggccacgagatcgcggcacgacagatgcatggcggcttcggaggcatgatctccgtacagatcgcagccggattcgaagcggcaaagaagtttgccggtgccacggaagtgtttaccctggccgagtcgttgggcggcgtggaatccctgattgagcatccgggtgccatgacccatgcttccgtcgccggtaccacgctggaagtgcccgccaatcttgtgcgactttccgtcggtcttgaagatgctgacgatttgatcgcagatttggaacaggcttttcgtcgtgtttgagataagatcgcagcctcgttacggttttgtgtaatccgtcaaaaaggcagaacgtgcataaatcctcgccatcggattcgccaaaagcgtatattatgctatttcgaatctgcttatggcgagggttttgccatataatactttcgacaacgttcgtgttcatctaccagcgcattctctgtggaatcgaacgcccatgattatcgagacgaggcggcatgctgcaaattcaaggcatctccaaacagtataaaaccggcgacttcgtgcagcgggcgctggataacgtcagccttaacctgcgtgacagcgaattcgtggccattctcggaccttccggctccggcaaaaccacactgctcaacatcatcggcggacttgaccactatgattccggcgatctggtgatcaacggcatttccaccaaacaatacaaaagccgcgattgggactcctatcgcaaccacaccatcggtttcgtgttccagagctacaatctcattccccatcagaccattctgtcgaatgtggaacttgccctaaccatttcgggcgtatcgcattcggagcgtcgagagcgtgcgcgcaaggcgcttgaacaagtgggtttgggcgagcatgtcaacaaaaagccgaaccagctttccggcggtcagatgcagcgcgtggccattgcgcgcgcgttagtgaacgatccggacatcgtgctcgccgacgagccgaccggtgcgcttgattccgatacttccgtgcagatcatggatctgctcaaagaggttgccaaagaccgcctcgtggtgatggtgacgcataaccccgaactggcctaccagtatgccacgcgcattgtggagctcaaggacggtgtgatccgttccgactccgacccgttcgaaccagcccagaacgaaacggccaccgctcccgtgcacaagaccatgggccgcgcatccatgtcgttcggcacgtcgttggcattgagcttcaacaatttacgcaccaagaagggccgcacgttccttacggcattcgcaggatccatcggcattatcggcatcgcattgattatgtccgtttcggcaggcgtgaacacttatatcgacaatattcagcgcgagacgatgactgcttacccgatcagtatcgacgaacagaccttcgacctgaccagcatgatgacttccggtcagcagagtgcggacaatcaaggcaagaagcataagagcgacgcgatttatccggatgatgccgccatcaagggcaccgcttcgatgaccagcagcattaccgaaaacaatctgagcgcgttcaagaaataccttgataataaggacagtgacatcaatcggtatatcggttccgcgggaatccagtattcgtatgatacgaggttctccgtattctcacacgatccagacggcacgcttgtcaacgccgatggtgtgacggtgggcaaaaccggcaccaaatcgatggccgaccagatggcggatggttcgctgatgtctgccgactcgtccacctttacgtcgacgcgcgtgagcatgctcacgggtaaaaccgaccagaatgctgcaccgagctcgttccatgagatcatgccaggcgctgatggcaaaaagaacgtcggcaaggtcatttccgacaattatgaggtagtcgaaggatcctggccaaagaacaagaacgaggttgtgctcgtacttgacgagaacaattcattgtcgttaaccactgtgtatgagctaggcctcaaatccgccagtgaataccacgatatgatgaaccagctcaattccggcgacgatgtgaaaaccgataccaagaagattgactattccgacgttatcgaccgcacgctgaagctgctgccggcctgcgaccagtatgtcaaaggcgataacggccattggacgtacgtgggcgacgatgtggaccagattaatgcgctgatcgactccgacaaggccatcgatctgaagatcgtgggcgtggttaagccggtagaggatgctgacgcaaccccgctttcctccggtgtgggctatacgcgtgctctgaccaatgagctgatcgaccgtgccgaatccagtgaaatcgtcaccgaacagcggtccgataaagatcacaatgtgctcaacggcatgacgttctcgccgtccgacgatgccaccaaagctcaggatgcccgcgattacgtcgcatccctcggcgtaagcagcaaggcgcagatggcgcagaacatgatggcggccgcaggcgcatccggaggtgactcccagcaggccgcggccatggctcagatgggtgaacagcagctcgccgaccaattcgacgcctatatcgccaccgccgacgaggccacgctggtcgccatctacaaccagtacgtgtccaccggctcctacaacgataatctcgctgatttcggcgtggtcagccgtgacgcaccaagctccatcaacatttacgtcgacagcttcgaagacaagaattccatcaacgacgccatcgacgaatacaataagaccgccaaggaaaaagacaagatcacctacaccgactacgttggtctgatgatgaactcggtaaccaccatcatcaacgtcatcacctatgtgctgatcgctttcgtggctgtgtcattggtggtctcgtcgatcatgatcggcattatcacctatatttccgtgctggaacgtaccaaggaaatcggtattctgcgcgccatgggcgcatccaaacgcaatgtgtcgaacgtattcaacgcggaaaccggcattatcggcctgctggccggtctgatcggcgttggtgccaccgtgctgctcaacttcccgatcaacagcgtgctgcaccacttcatgggtaccaccgaggtcagtgccgtgctgccggtcggtaatgccatcgctctggtgattctcagcgtagtgctcaccctgatcggcggcctcatcccaagtcgtggcgcctccaagcaggatcccgccaccgccctccgcaccgagtagaagcggtttgatactagactgctgcgtatgacagagtttacgtcggcgcgtgacgccctacgcacctacttcggatatgacgccttccgtcctggtcaagaaggcatagtcaatgcgattatccaaggccgtgatgcgctcggcgtcatgcccaccggtgctggcaagtcgatctgctaccagattcccgccacgcttcttccgggcatgaccatcgtcatttccccgttgatctcgttgatgcgcgatcaggtcgacgcgctcaacgacgtgggcattccagccgcgttcatcaataccacgcaaagtcccgacgaacaggatctggtgttcgcgcaggcgttgtcgggacggatcagattgctgtatgtggctccggagcgtttggaaaccgaacgtttccgcacgttcgccagtcgtgtgccgatttctctggtcgccgttgacgaagcgcattgcgtgtcgcaatggggtcaggatttccgttcgtcatatcttggtatcggcgattttctgaaggcattgccgacccgtccgacggttgccgcattcactgcgaccgcgacggaacgggtgcgtcgcgatattatcggcattctcggattgcgcgatccgtccgtcaccgtcaccggcttcgacagggccaacctgtatttcgatgtgatcaggatggaaaggaaatataaggcttcgtgggtggcttcatatattgcggatcatcctgacgaatccggcatcgtgtattgcgcgacccgcaaggaagtggagtcgcttgccgaatcgttgaatatcgccgtgtgcgagctgcgtgctacgaaaggtgaggatgcgacgcgacttggcatggtcgcagtcgcctatcatggcggtatgtcggccgaaacgagggaacgggcacaacgtgatttcgtaaccgaccgtgtgcctgtggtggttgccacgaatgcgttcggcatgggcatcgacaagtcgaacgtgcgttatgtgatccaccataatatgccggaatcgatcgaagcgtactatcaggaggccggtcgtgcggggcgcgacggcgagccgagccggtgcacgttgctgtggaacgaatctgatattgctacgaggcgaaggctgcttgattcggattatgagaacgagcgtttgaccgccgaagagcaggaggtcgtgcgtgcgtcgaaacggcgtctgctcaacgccatgatcggttattgccgtaccacggattgtctgcacgagtatatgaccaggtatttcggtgaggccgggggagcggccgtccgtgatgacggcacatgcgtgggaggatgcgcgaactgcgggaatacgtttgaaaccgttgacgtcacggatatcgcgcgggccatcagccgctgcgtgcatgacgtgaaccagaaggtcggttcggggaagatcgtcaaagtgctgcgaggatcgaaagcgcaggatttgaactatcttcatcctgccgatctgccgacgtacggcatgttgagcgcgacttcggaggcgcagattcgtgacgtgctcagccagatggcgacggatggttttctttccatttcggaaggttccatgccgatcgttcgcttcggtgaacgtgcggcggaaacggtcgtgccgaattttcattatgaaatcaagaagatcgaacggaagcacgctgcgaaacgtgcggaatcgccgtccgcaggctctcagactatgggatcgtatgtgccgggcgacggagacgaggaattgttcgccaaactgcgtgcgttgcggcttgacatcgcccgcgaactcggtaaacccccgtatatcgtcttttccgataaaacgctgcgcgacatggtgcgtatcaggccggtcaccggcgagcaattctcgcaagtcaatggcgttggtgcgctcaaattggaagcgtatggcgaacggttcatggaagtgatccgcgatttcgttgcatgaatcaggtgacgtgtcagcttgaggaataagcgtatcgattattgcaaaatcatacgttttatatgatacgtaacacgttatcggcaacatgtatggcggtgaggttgacgtatgccggcaaaacggcgacagtagagacgaacagttgttgaagaaaggattgatgatggcagaagacaagccggttgtggaaagcttccagctcgaccacaccaaggtgaaggctccgtatgtgcgttatatcgacacgcagaccggtccgaatggcgatgtgatttccaattatgatttgcgtttggtgcagccgaatgagaatgcgattccgaccggtggcctgcacaccatcgaacatacgattgcggtgctgttgcgtgaacgtatcgacggttatatcgattgttccccgttcggctgccgtaccggtttccacctgctgacgtggggcgagcattccacggaagaagtggctcgcgcgttgaaggaggcgttggaattcatcgcatacgaggccacatgggatgacgttcctgccaccaccatcgaaagctgcggcaattaccgcgaccatagcctgttcacggcgaaggaatggtgcaaggatattctcgccaagggcatcagctctgacgcgtttgagcgccgtctggtctgatttgcgtgcgattgcacgtcttttttcgggcatattgcgaatactgtgccgtgggcatggtatttttgacgctcggaagaagacaaggtgatgcaaaggtgaacgagatgggtgaggagagcgtcattacctctgaacggcggttccgtcgcgccactatggctgatttgccgaccatgctgaagatttatgagcatgcccgcaagttgatggcctccaatggcaatcccacgcagtggggtgataagttccctcgtgaggaagtggttcgtgacgatgtcgaatcgcaacgcaccgtgttgctggtcgatacggttgatggcgaggaacgtgtgctcgcccagttcgcattgtgtccgggcatcgacccgacgtatgtgaatatcgatggtgcctggctggatgacgatccgtatgtgaccatccaccggatcgcctcgtcgggtctcgccaagggtgcggcgaaggactgcatcaactggtgcatcgaacattacggcaatgtgcgcgcggatacgcatcccaacaacaaggccatgcagcatgtgctcgaatcgaatggtttcgcgcgctgcggcttgattcagttgcttgacaggccgtccgacaccacgcgtatcgcttatcaacggcatgaatggtgagatttgcggatttatatggattgatatcaatcaatataaatttcatcacaaataatcgcaaataatcttcgatattgagaagcaaaaatcccgttgcatatcgtatttcagatgttcaacgggatttttatatccgattgtgttgctttcgatatatcttacgaaagatatatcgaaagcaaccgtatcgtcggtttttagaacagtcctggctcgttcaatgcggaatgcttgcggctgtacacgaaatacacgatcaaaccaagggcgaaccagattgcgaaacgcacccaagtctcccaattcaaaccgcagatcaggatgaagcagaaaatgatcgcgcagatcggcgtgaacggtacgcccggggcgcggaagccgcggtgtgcgtccggctgggtcttacgcatccacagaatgcccgcggacacgatgatgaacgccgacagcgtaccgatgttcaccaattcgaacagcacgttgatgttgatgaaaccgccggcgatggccgttagaataccgaagaaccatgtacctttgaacggggtgcggtatttcgggtgtacttcgccgaagaacttcgggaacaggccgtcgcggctcatggcgtagcagatgcgggactggccgtacagctgcaccagcatcaccgtggtcatgccgatcagagcgccaagattgacaacgaacgccagccagttgagaccggtttcgagaatcacgccggccaccggagcgtcaatgaagttcgcgaactccttgtatggcaccacaccggtcatgatcagcgtcatgacgatgtacagcacggtggacacggccagcgagatcagaatgccgcgcggcagtgtcttgttcggattgatggtctcctcggcggaagaggacaccgcgtcaaagccgatgaagctgaagaacacgatcgacgcggccggaacaatgccgtacggctgcgtcgagcccggctggaacgtgtaaatgccgtacggggagaacggcttccaattggcgggattgatgtaccagacggtgcacacgatgaacagcacgatgatggccagtttgatcatcaccataatatcgttggttttcttcgtctggttaatgccgatggacagcacccaagtgatgatgagcacgatcacgaaaccaggcagattgaagtatgtggtcacgcctggcgtggtgccgtatgccgcagtcagttcaactggcagatgcaagccgaaaccttccaacagtttgttgaaatatccggaccatccggcggacacggtggccgcctgcaaggcgtattccaaaatcaaatcccagccgatcacaaacgcgatcagctcgccgaacgccaaatacgcgtacgaatatgcggaaccggacactggtgccatcgcggcgaactccgcatagcacaatcccgcgaaaccgcagcagaccgcggccagaaggaaggagatgcacaatgccggacctgcggtgagggcgcccttgccggtgagtacgaaaatgccggtgccgatgatggcgccgattcccagcatggtaaggtcaaatgttttcaatgtgcgtttcagcggagtcgactcggatacgagctggtccactgactttttgcgaaaaagatccatggtcttaattccctaaaaatggttttatatgggctggaccggacggatttccgggactctggcacgcctcaaacgccagaaatcaaagaagggctgaacgcctcatatacgggaggtgtacgcgccttatgtaaggagagtgtaaaaacctggcacggacaaaaccgtgaaaaccccgtgaatcgtctcgctaagtgtgcgcgttttttcgaagccgtcacgtgggagcgcaacaatagagtcatgactttcaacgctgcccgtgaatggcaattctcatccgaacaaggcaaggccaattatgaggccgcccaaaagcaatatccggcgcaggccatcgtcgatatggccgcattgcgaaacaacatgcgtcatctggtgagcgtggttggcggcccgaattccggcaccgccgtgatgggtgtggtcaaggccgacgcgtacgggcatggtcttattccggccgcgctcgcggcactggcgggaggtgcgacctggctgggcacggcgcaatcacatgaggcgctgctgctgcgcaaggcgggcatcgggccggaccgctgccacattctgacatgggtatataacggcatggctgtgccttttgacgagctgatcgacaatgatatcgatatttccgtcggatcattgccgggcattgacggcgttgcggctgcggcgcgtcgtcttggaaaaaccgcacgtgtgcatgtgaaggtcgattccggtttcggccgcaacgggttcacgcccgccacgttcgacgcggcgctcgccaagctggtgccgctcgccaaggagggtgtgctgcatatcgtcggccagtggagccatttggcggtggcggacgctccggacgttcctgaattcgtggcatccaccgacagacagatcgagaatttcaaggatttcacccgtcgtatggagcaggcgggcattgcgccggagattcgtcatctcgccaataccgctgccacgctttcacgttccgagattcattttgagctgacgcgcccgggtatcggcctgtatggttatgaggctgatccggccatgggcacgccaggtacatacggtttgacgccggccatgacgttgcaggcgcagcttggtacggtcaaggatgttgaagcgggccatggcatttcctatggccgcacgtacctgactccgtccgatacgtccaccgcgatcgtgcctgtcggctatgcggacggcattcaccgttccgcttccggttttgatatggaaggcgcgaagcatgtggtcaagccaggaggcccggtgcgtgtgatgaccacggagggtccgcgcctctaccgtgtgtccggtcgcgtgtgcatggatcagtttatgcttgacctgcacggttccgcggaaaagcttggcgtgcatgagggcgacaccgtgcagctgttcggaccgggtcgcggagaggattatgccgagccgaccgccgacgattggggccgtgccgcaggaaccatcagctatgagatcttcacctgcctgtgcaaccgtatcccgcgcctgtacgagcatgcctctgacgtgctgtcggtcgaagatctcgccaaactcgatcccgcaaccctcctataaagaatcaggcgtgcgatgggaggcacgccgtgaaagtcaatatggtgggcgcggtacgttcgatggttggtcaacgtgccgcgcttgctgttaaggtggtgagctatgccaggaatgattctgaaggaagatatcgaaaaagttcgcgccaccgccgatttgtacgacattgtgtctgcaacggttacgctcaaaccttcaggaactggcacatacgtggggctgtgcccgtttcatgacgagaaaacgccaagcttttctgtgcgtccggcgctcggtgtgtggcattgcttcggctgcggtcttggcggagacgtgttcggttatgtggagcatcaggagaacgtcgactttcgtgatgccgtcgagcttttggccgaccgataccatatcgaattgcgttatgaccagtcgaacgccaagaaggagcataccggttcgaaacgtgcccgcctgttggaagccaacgaggccgcgcaggagtttttcgtctcgcagctgatgaccaaagacgcgctcgccgcgcgcaaactgcttgatggccgtaatttcagccaggccgattgccaacgattcggttgcggatatgctccgcaaggctgggataatctggtgcggtacttggcaggcaagggcttcacacagcaggaaatgttggacgcaggtttggcccgtcaaggccagcatggggtgtatgactatttccgtggccgcgtaacatggccgattcgcgattcaaccggacgcacgcttggtttcggcgctcgcaagttgtatgaggatgattcgattagcgcgaaatacattaatactcccgacacgcagttgtatcggaaaaaccaggtgctgtatggcattgatatggcgaagtcggcgattgtgaagaaacgtcaggcggtgatcgtcgaagggtatacggatgtgatggccatgcatttggccggcattgataccgcgatcgcgacatgcggcaccgcgttcggtgccgagcatgccaagatcgtgcgtcgtctgatcgccgacgattcgttgggtgcggtacagctggttggtccgttgaaggttgaaggacaggcgttgagttcgcgtatcgtgttcaccttcgatggcgatgcggccggtcagaaggctgcgattcatgcgttcggcttggattccgctttttcgacgcaggcgttcgttgctgtggccgacgacaatctcgacccgtgtgatttgcgtatcaagcgaggtaatgaggcggtccgcgcgttgatcgatcatgccgaaccactgtatgatttcgtgatcaaaaccgcgatcgggcgtttcgacaccacttataccactgggcagatgggcgcagtcaaggcggtggcgccgttgatcgcacagattcgtgaccgttccctgttggatttgtattcacgcaaggcggtgcgccagatcggcgtcgacttggatatcatgcagcgtgaagtgcgtgacgcacgacgcaaactgcgggtgcgggacgaagatgcgtacgctccgaaacgtcgttttgcaggcaatgccggagctgcggtggaaccgcgtatggaacaaggcacgaatccgtatgcgaatccttccgcgcggaaggcgttggaacatcgtgatgcggcggagcaatcctactatcgcattgatgatgccgtgttcatttgcgaacagcagttcatggcaaccctgattcaagtgccgcttgccgttgatccgacactgttcgccagtcttacgctgtcgagcttcatgacccccgtattccgcacgttattccaagcggtcgcggcggccgggggactgccgtctgctgataccccgcaaggattgtggatgcacaatctcaccaaagcgggtggtccgatgttggaatccgtcatcaacgagcttgccgtcatgccattgccgcttcctccgagcgatactgacgcagaacgtgcgtcgcaacaatcgcaggaaggcaacgtgcaattgcgcaagccgaccgacgacgaacgcagatacgcgtctgaactcatcattcgactgcttgacacgggcatcatgcgcaaaatcggcgcggaccagcgtcgcatggcgcaactgccggacggtgccgagaaaatcgagctgcttggccagattaccaagctggaaacgttgcgcaaggatctgcagacgagggtgttcggcaataacgtcgcctgaatatttggtgtgccggagcgtcaacccccgaacgtctttgtcgttcacctgaatttgccacatgcctgagtgcggtatgaacagccggcgaacgtgtggtgaacgcaggaagaatacttaacgaattcttggctggtgcacggtatccttcggcgtgttttgcaattgcaaaacagttttgccggtttgcaaagtcagggaacagtaaggcgcatgggctgaaaaacgttggaatggtcggaaaaatagtatgccaagggtatgtggtacgcgatttttcgggtaaagtgaatacggcgtttcttgagtaaatcgcccgggtctgcaaacggtttgcaaactggattcacggaggaatgaatgcgacgattggtcgtcaaaatcctgaaaaacgagaccattctcgtagttgcttccatacttgctcttatttcatgctttatcgtgcctcctgacaaggagtatgccggatatattcatgccagcaccatttcgcagctgatctgcctgatgctggtggtgtgcggtttccagcgcatcggtgtgttccgcatcatcggttcgcggttgctgcatcatgtgagcaccgcccgcggattggtgatcacgctgatttcgctcacctatttttccggcatgctgattaccaatgatgtggcgctggtcacgttcattccattcgcgatcgcggtgctcaccatggctcacatggaggagcatgcggtgctggtcggcacgttgatgaccgtcggtgcgaacgtgggcagtatgttgacgccgatcggcaatgcgcacaacctgtatttgaaagcgttgacgggcatgccgtccgctgaaatgatcggcattatggcaccgtattccgttgctgcggcggtattgctggtgattatcgtctgtgtggtgttcggtaagaaacctgtttccgaattttcctctatcgacggcagcggcatcgaacagaatgtgctcgctccgaattccgatcagccgcagccggatgagattcgtgtgaccggctacggcgcaggttacggtggttggcgcacgatcgtatattgcgcgctgttcatcgtgtgtttgctggctgtgagcgatttcattccgctatgggccatgtgcgtgatcgtggtggtggcgttcctgttctgcgatcgccgcgtgttccgcaatatcgactggggattgccgctcacgttctgcatgttcttcattttcatcggcaatatgaaacgcgtgccggaattctacgagctggccgcctccttggtgggggcgcatccgctggaagtgtccgtggtgtccagccagttcatttccaacgtgccgaccacgttgctgctgtccggcttctgcgaccagtggcgtgaactgatcatcggcaccaacctgggcggcttgggcacgctgatcgcgtccatggcgtcgctgatcggctacaagaacgtgacgcgcgcctacccggacaagaaaggctgttatctggccgtctacaccgcggtgaacgtgctgttcgtcatcgtgctcgtcggcctgagctggattatcgagtagcgtttggccgtcgaccggtttccctgaccgctaatctcaaggtcgccggttcgcaccttttgctgggattgcatgaaaacccttggaatcattggatttcaagggtttattgttacgtcggctgatggtctggtgctgtgataatctgtgccgggaagcgtgtgccgagaaacgtaggaaggctgaacatgctgcaaggattgctgggaattttctccggactgatcacgccggtgcagaccgcggtgaacacgcggctcggccgttccatcggctcgccgttgcgcgcctcgctggtgtcgttcagcgtcggcctcattgcgatgctgactttgacgctgctgcttggcccgtatccgctgattcccgccaccgcggcgaacggcccatggtggatgtggttcgcgggcgtgttcggtgtcactttcctgaccggcaatgtgctgctgctgccgaaactgggcagtctcaaaaccgtgatcatgccagtcaccgggcagatcgtcatgggcctgctgatcgacgctttcggctggttcggcactaccgcgcagccgatttccccgctgcgtatcgcaggcgcggcgatcacgctggtcggcttcctgcttgccgtcgccggaccgaatctgcgattgaggcctgccatcgatcgcccggctggcggttcggaaaattccggcgattccgaaaaatccgaaactgacggaaaagccgtacatgtgccaggttccgcgaccgtgctgtggagttgcgcaggcatcgcgttcggcatgtgttcggccgtgcagacggcgttgttgggcaagctgggcgtcgcgttgggatcgccggtgaaggcatcgctcgcctcgttcgtggtcggtctgatctcgcttgcgatcgtcgtcgcattcgtcgaccgcacctacagcctcggcgacgcgctgaagaaaggcaatccgtggtggatgtgggtaggcggattgctgggtgcgatgctggtgatgtgcaacgcgtacctgtccgcgcatatcggcaccggcatgacggtgatgctggtattgctcggtcaggtcggcggaggattgctggtcgaccgtttcggcctgcttggcgtgccacgcaagcccgtggccggcatccaatacgtcggcgtgctcgtagccatcgtcggcattgtgctcaaggcgatgtgattgccgtgtcgagttggcaaccgtgtgcgaactgactatactgtgtttagtttggccctgtagctcagctggatagagcatgtgacttctaatctcaaggtcgccggttcgagcccggccggggtcaccatcaagccctcgcgtcgtttcatgcggtgcgggggctttcctgtccattgaacggcaagccattggcttgcgaagataggggagaccatgaagcgaatcgtcgcgggcattctggcgcatgtggacgcgggcaagaccacgttgtcggaggcgctgctgtacgctaccggccaagtacgcaaactcggccgcgtcgaccacggcgacgccttcctcgacacggacgccatggaacggcagcgcggcatcaccatcttcaccgagccggccgtcatcgccacgcccgacctcaccatcaccctgctcgacactcctggacacgtcgacttctccgccgaaacggaacgtacgctcgccgtgctcgactacgccatcctcgtcatctccggcgcggacggcatccaaggccataccgaaacgctgtggcgactgctcaatcgctatcaggtgcccacattcgtcttcgtcaacaaaatggactcgcccggcgccgacaaaacgcaactgctcgcccaactcaagaaacgcttctcggacggctgcgtcgacttcaccgagccgattgacggcgaacgcatggaggagatcgccatgcaaaacgaaacggccatggacgcgtatctcgacaccgaaaccgtgccggacgaaaccattcgcgccatgatcgcccgccgtgagctgttcccctgttatttcggatcagcgctgaaaatggacggtatagaacagttcgtcgcaggtttcgaacggttcgcgcaagagccgcaatacaatggcgaattcggcgcacgcatatataaggtgtctcatgacgcgcaaggcaaccgtctgacctggctcaaggtgaccggcggcgaactgaaggccaagatgatgctaagcggcaccgcgcacgccggcgacgcggatgtggttgccgaagacggccaatggcatgagaaagccgaccaggtgcgcgtctattccggcgcgaaatccaccaccgtcgacacggtccccgcaggcaccatctgcgccgtcacgggtctgacgcagacattccccggcgaaggcctcggcatggagcgggacgccggcagtccggtcctccagccggtgctcacgtacacgctggaaccgggggagtgcgatattcacaaatgtctcgtcgccctacgcgaactggaggacgaggatccgctgctgcacgtcgtctggcagtctcgcctagaggaagtgcacctgcagttgatgggcgcggtgcagctggagatcatccagcagatcatgcacgaccgtttcggcctggacgtcacgttcggaccgggcagtatcctgtacaaggagacgatcgccgcgccggtcgaaggcatcggccatttcgagccgttgcgtcactacgccgaaacgcatgtgctgctcgaaccgctgccgcagggctcgggcatggcatacgccaccgtgtgcagcgaggacgtgctcgaccgcaactggcagcgcctcatcatgcagcatttccaggaacgcgagcatctgggcgtgctcaccggctcgccgatcaccgatatgagaatcacgctgctgacgggccgtgcgcatctgaagcacacggaaggcggcgatttccgccaagccacctaccgcgcgatacgccagggcctgatggaagcgaagaagaagggcgattgccgtctgcttgaaccttggtacggcttccgtctggaagtgccgcaggacatggtcggacatgcgatggccgacatccagcgcatgtcgggcacgttcgacacgcctaccggcgacggcgaatatatggcgttgaacggcacggcgccggtatccgaaatgcgtgactatgcgatggacgtgaacgcgtacacgcacggccgtggccatttaagctgcgtgttcgccggctaccagccgtgccacaatgccgacgaggtgatcgagaacatggcttacgatccggaatccgacctggagaacacgccggattcggtgttctgcgcgcatggcgccggctatccggtcaaatggtacaaggtccccgaattcatgcacctcgactacgcctggcacggcgaagaggcgtaaaacatgtagataggctgccgacgccggactgtgcaaagttccgcgtgtcggcagttttttttaaaaaaaaacgcgagtggagtagatgtgtgagaaaaagaaaacccccacacgaggtggggcttggtggagcggacaacgggactcgaacccgcggtctcaaccttggcaaggttgcgctttaccaactaagctatgtccgcaaagaacttccgccgtgagaagcggaaattcagtgggtgatataggaatcgaacctatgaccccttccgtgtgaaggaagtgcgctagccgctgcgccaatcacccgtgggataattccaccggtttcccggcttcgttacccgcttcgcgtgggcgatacaagattcgaacttgtgaccccttccgtgtcagggaagtgcgctacctctgcgccaaccgcccgaagcgagtgttagcttacgtggattctcggcggaatgcaaatcgtcggcgtgtcgcggttggttgggcgggctgcgacacgcgcgtcaatcagtaagtggcacgacggggatctccatggtgatcgcatccggatcagtgtcgccggaggcgttggaatcattggactcaccggtggtgtgggctaacgtcagacgcatctgatgccaagccacattgccgtgtgtggaagccgacatgccttcgtccatgaatcccaagcgggagtaaaagccaacaagacgttccttacaagtcagcacaatgcctttgcgtccggcaatcgtcgaatcaaggatcacacgacgcagcagatagctggcgcaaccgcgatgctggtagacgggagccacatccacgccgaaaatcatctgccaatcaccctgctcgtcatgcatggaaacatcctcatacatgacatcagccaaatctttctcattggtcgtcatgccattgacgaaaccaaccaacgtgccatcttccacggaagcggggaagcaggcgtcgtcatcggcgtcagtgttgatcaaaagccagaaatgttccggatatgtggcgacgcgtgcggtcaggctctcgttcgttgcggcctccgcaggcgggaagcaggcagcctccacagcctcaatcgcgtccaaatcctccatcgttgcatgtcgaatgagcatgtgcatactctctcgcaaggcatacccaatcttcacatttcgatatgagctgacggcggaaagcgccgacgtgcaatactgtggcaaggattaccgggaagcatttcttgaaggttgataaacgcttatacgaaaaaccgataacgacgtggcctgttccgtgattatcgcgcggtacgatggggcgcgttcaaggctaaagcttggaaacagcctgagaaggcttcaaacgatccgcagaacattcgaaaacctagcgagaaagaggggaggcgcgtgtgttcgactggacattcgtgacgcactacgcgccgttcttcgtcaacggtgcggcgatgacgttgttcatttccgtgttcggcatcgtgctttcgatcgtggtcggacttatctgcgcaagcattgaaatcgcgcgcattccagtgctgaagcagatcgtgcgcgtctacatcgaactcagccgtaacacgccgttgttggtgcaactgtatttcctgtatttcggtctgccgaaacttggcgtcgtctggtccgcggaacaatgcgcgatcgtgggactcggattccttggcggttcgtatatggccgaagcgatgcgcggcggcctcgaaaccattccgaccgtgcagcgcgaatccgcgtatgtgctgggcctaagccaatggcagacgttgagccgcgtggtgataccgcaggccatcagcacgtccattccgggcattgtggccaacgtgatcttcctgatcaaggaatcgtccgttgtgtcggccatcgcgctcgccgatgtgatgtacatggccaaggatctgatcggcatgtattacaacacgtatgaatcgttgttgatgctggttgtcgcatatctggtgattctgctgccgatctcattgttcggcacttggctggaacggaggttcgactatgagcggcgctgagattctgctcgagccgggcgtgtttccgcgcctgttgcagggcctgtgggttacggtgtggatcgccggtgtgtcggtgggtctttccgtgccggttggattggttgtcggctggctgatgacgatgaaaaatcctgtcattcgtgtgttgaccaggatttatttggatttcattcgtatcatgccgcaattggcgttgctgttcatcgcattttatggctttgcccgtgcgtggaattggaatttggatgcgaccggcgcatgcgtgttcgtgttcgtgctgtggggcggcgcggaattaggcgatttggtacgtggcgcgcttgagtcgattccgaaagcccagtatgagtccgcatatgtgcttgggttgagtggctggcagacgttcgtcacagtgattctgccgcaagcgttgcgtaggcttctgccagcttcggtgaatctggcgacacgaatcgtgaaaacgacatcgttggccgtgattctcggcgtggtcgaggtcatcaaagtgggccagcagatcatcgacgcgaaccgtttccaatatccgaccggaaccctgtggatttacggggtgattttcttcatgtacttcattgtgtgctggccgctgtccatcgtggcccgccgactggaaaagaggtggtcgcatgactgacgcgacaggcaagcaggctcaggtgggtcaggcgagtcttgagattgcgcatctggtcaagcagtacgccaatgccgacaagccggtattgaacgatatttcgttcgacgtgccgcatggcaaggtgtttgtgatcgtcgggccttccggctccggcaagtcgacgttgttgcgcaccatcgccggccttgagccgattcagggcggtaccatttctctgaacggcgaagtgatcgaaacgggtaagccgggcaccgaatccgccggccgcagcaagcgcagcagcgaactgcgtacccgtgttggcatggtgttccaaagctacgacctgtttcccaacaaaaccgtgcttgacaacatcacactggcgccgaccttggtgcagaagcgagataaggccgaagtcgagcaggaggcgatcaagcttctggaacgcgtcggtcttgccgaccgcaaggattcctggcctcatgagctttccggcggccaacgccagcgcgtggccatctgccgtgcgctgattttgcatccggaagtgctgctgttcgacgaagtcaccgccgcgctcgatccggaaatggtgcgcgaagtgcttgacgtgatgctcgaactcgctgattccggccaaaccatgctcatcgtgacgcatgaaatgcagttcgcgcgagccatcgccgatcaggtgatcctgcttgaagacggcggcattgtggaacggtccgacgatgccgaacgattcttcaccaatccgaccaccgaacgtgccaagcagttcctgcatacgtttgaattcgacaggcaccgcaagtccgccgatcaatccgaataatccaggcaaatggcgaagatcggcgaagatcggtgcaattcaagattttgatagcagtcatctttgcaagagaggagaaaccatgaccgcatcaatcgtcaacaaaacattcaagagcatcgtggccgcatcggccgcgttgatcatggcagcctccgtggctgcttgcggtccgtccgcggccactccgagcgacgaaggctccacgggtagcgattccagttccagcagcagcgccaccgcccgcactctggatgagatcaagaagtccggcaagctcaaggtcgccgtgttctccgacaaggctccgttcggctacgtcgacaaggacggcaactatgccggctacgacgtctacttcgccgagcgcttgggcaaggatcttggcgtagacgttgaatacacctccgttgacgccgccgcccgagtcgacgtgctcacctccaacaaggtcgacatcacgctggccaacttcaccgtcaccgacgagcgcaaggagaaggtcgacttcgccaagccgtacatgaaggtggcgttgggcgtcgtttccccggaaaacgccgaaatcaccgacgttgaccagctcaagggcaagaccctgatcgtgaccaagggcaccaccgccgaaaccttcttcgagaaaaactaccccgacatcaagctgcagaagtacgaccagtacgccgatgcctacaacgcgctgctcgacggccgtggcgacgccttctccaccgacaacaccgaggtgctcgcatgggccaagtccaacaagggcttcaaggtcggtatcaccgaactgggcgataaggacaccatcgctgccgcagtgcagaagggcaataaggaattgcttgactggatcaacgacgaaatcgacaagcttggcgatgaaaacttcttccacaaggattatgaggagacactgaagccggtgtatggcgacgaagtcgatcctgatgaaatcgtggtcgaaaaaggtgtggtcgactgataactagttaatcaaactaaatattttgaaccttccgtcgctttaggcggaaggtttttctatattcagataatcatatttacatacaaatatatgattgctgataacgctatataaaaaacaattattacgattcgcgccttccataaaaagcgtatatagccacgccgatgttgccatgttgtttttccgatatcttgtgattgtctgcttgaaaaacaagcgagatgttttacgagagaggagcacggaacgtgaagtacgcagtgatcggtgccggcggaatgggcatccagtacggtgtgctgctgcaggaattcgcgcacaaagacgtcgacttcgtcgatacatggaagccgaatgtcgagaagatccgcgagctgggcggtgcctacgtgtcgcaagacggtgaagaccgtcatctcgtgccgatcaacgtgtactatccggaggaatacgccggccagccggacgtgtggatcgtgttcctcaagcagatgcagcttgacggcgtgctcaagcgctgcgcccatctgttcaatgagaagcagatcgtgttctccgccatgaacggctatggacacttcgaaaagctcaacgaatacttctccacagaccgcatttacggcggcaccgcactgatcggtgcctacgtgtacggccccggcgatttcaacttcaccggcggagtacatgccaaggccatgaacctgtgtgcctacgcggatgatgtgactgacgaggtgcgcaaacacgagcaagcgctgtacgaggatttcgcaacggccacgctcaacccgaccatcgtggacaacttcatcggcatgtgcatggcgaaaatcgtattcaactcggtgctgaacacgctgtgtaccatgtaccagattcgtttcggcgaattccatgcgcatcccgacgcgcgttggctcaccgaacagctggtcgctgaagcctacagtgcggccgaagcagccggataccaactgttgggcacgcgcgaaacggaagtcgaaaccattctgcacaccgcgggcgtggcacatccgctgcactatccgtccatgtatcaagacctgaccaagggacgtccaacggaagtcgactacatcaacggctatatcgccaaagtcggacgcgagcatggctacgaatgcaagctgcacgaattcctaacccgcgaagtgcatctcgccgaacaagccttcgccatccacaatccgaacatcgtcgcacaggccaaagccgacgtcgaagccagtaagccggtaacggaataatcgtattttttcaaaacaagtaggagagggaaaacaaccatgaccatcgctattttcaagaagccgaacggcatcaaacgaatcgttgcagcagtacttgccgctgcaacacttatttccgttgcggcatgcggtttcggcaacagcgcacgcatccaaggaaagcctgaacaccacgaagggcaaaaccaccacaatcaccgtcggcgtgtgcgcaggaccatacggcgacatggtggacaaggtcatcgcgccgctgctgaaagatgacggtttcaaactgaaaaccaagctgttcaacgattatgtgcagcccaataaggcacttgcatctggttccattcaggcgaatcttttccagcatggcaattatctgaagaagttcaccgccgacaacaatctcgacctgacctcccttggacagaccccaacccttggcctgggcatctattccaacaagtacaagtccatcgatgacatcgaagacggagctacggtcgcaatcgcgaacgatggctctaacctggcacgttctctcggcgtgctccagcagcggggtctggtgacgctcaagggcgaagtcgatgccaccaaggctacggtcaacgatatcgcatccaatccgaagaacctcaaaatcaaaacgatcgatgctgcacagctggcccgttccttggacaccgttgatgtggctctggtgccgggcaactattcttgggctgctgatctgaagcctgccgacgcgctcgccatggaaaagcaggatggtggcgtgatcgaagtgttcgtggtccgtacccaggacgtcgattccgacttcggcaaggccgtcaagaaactgctcgtcagtcagaaattcaaggacgccatcgccaagagcgagttcaaggatttcggcaagccgaccacttggtgaccgctgcagcgcggcgataggtaatatgcaaagacccgtatgaattgggaaactcatacgggctttatgcaaacgagattcatcaaacgaaacgtatcgaacgaaacgtatcgaacgaacgtaaacacgtacttgaacggaatgaggaacgaaccatgagcgttattgaactcaacgacgtgtccgtgacctttcatgaaggcggacgaaccgtcgaagcggtcaaacatgtgaacatcagcgtggaaaaaggcgaaatcttcggcatcgtgggcttctccggagcaggcaaatccacgttggtgcgcaccatcaacctgctggaacgaccgacgggcggtcatgtggtgatcgacggcagcgacatcaccgcactcaaaggcggtcagctgcgcgacctgcgcaagaaaatcggctttattttccaaggattcaacctgatcaccaatgtcacggtcggcaagaacatcgaattcgcgctgaaagccggcggatatccgaaagcgcaatggtcggcacgcatccgcgaactgctggcactggtcggtttggaaaacaaaatcgacagctacccgtcaagcctgtcgggcgggcaaaaacagcgtgtatccatcgcacgtgcgctcgccaacaagccggaaatcctgctgtgcgatgaagctaccagcgcacttgacctggaaaccacggaaggcattctggcgcttctgcaacgcatcaaccgcgaactgggcattaccatcgtgttcatcacgcatcagcttgacgtggcgaagcagattttcgaccgagtggccgttatggaaaacggtgtggtagcggagcaaggcaacaccttcgacgtgttcagcacgccgaagcatccgaccaccaaagcgttggtggaacgctatctgggcattgcggtgccgccgcagctggtgccgtcgctgccggccggcaccatcgtggaactgcgatacaagggggatgcggcactcgaaccgctcatcagccgggtcgcgcaggattacggcgtgagcatcgacgtgctgcatgcgaatgtggaatatttcggttcgcaggccatcggcattctgattgtgctcgtttctggcgcgggggagccgctggtgcaggcgttgaatacgttgagaacgcatgtgttcagctatcgggaacttgatcgtgggcagctggttgtggccgccgaagctgcggataatcaggaggcgtgagaacaatggaagaaactctggaaatccttcaagacaatctcggtcaggcgttgatcgacacggcatacatggttgtggtgtcggcgattatcggcgtggtgttgggcacgttggtggcgttgctgctgtatttgaccgaaaatcgtttgttcacgccgaatcatgcgttgaacgttattgtcggtttcatcgtcaacgcgattcgttcgctgccgttcctgattcttatggtggtgctcattccggttgcgcaattgattctgggtgatccttacacgccgacaggtggcgcaatttccctgtcgatcgccgcggtgccgttctttgcgcgaatcgcggaaagcgcgttttccgaagttgatccgggcttgcttgaagctgccatctccactggtgccaccacacgccaaatcattgtggatgcggtattccctcaggccttgccgtcgttcattcgtggtgtggtgctcaccattatttcactgattggctattccgcaatggtcggaacgatcggcgctggcggcatcggcgatatggccattcaatacggctataaccgttacgaaaccggcgtgctcgtcgtgattgttattattctgatcgtcattgtgcagatcattcaatggatcggcgattggttcgcacgcaaggtgacgcactgatggttgcgtatatgcgtgaatgtgcgcatatacagtcgcacgatgatagggaggggtgatgaatgacttcgtatgtttctcctgttgcgttcactacggtggcgcagtcgattccgccgaatgtgttcgccgatatggatcgcaaagtggctgccgcggttgcggacggggccgacgtgatcgacctggccaaaggcaatccggatgcgttccccgctgacttcattcgagaagtggccaaaaaggcggttgacgatccggccaatgcccggtattcgccgttcgacggcaaaccgagttttctgcaggctgccgaacagtggtatcgcaacacgtatggtgttgaggttgattggaaaacccagctttttgccgtggagggcgcggttgatggtctcgcggcgctgttcgccgtgcttgtttcgccgggcgatgctgtggcatatgcggatccgtattacccctcgtatcattgcatgacggtgatgagccgtgccgaggaggtgctgctgccgtcgctgccagagcgcggcttcctgcctgatttggatgcggtgcctgcgcaagtgtggaatcgtgtgaaagtgctggtgctcaactatccgaacaatccgacgggtgcgcaggctccgcgtgggtttctgcaacgtgccatcgatttggctcatgaatatcatttcgcgatcgtgcaggatttcgcttatgcgggattgggagtcgatgcgcagcaaatcagcatactgtcgctgccgggtgccttcgatgttgcggtggaagtatgctcgctgtcgaaaatgtatgcgatggccggctggcgtgccggtttcatcgcgggcaacgacgacattgtgtctcatgtgaagcagtaccactatcaaatgggttccatggttacgtccagcattcaagacgcgggcactgtggcactgctgtcggatcagagctgtgtggccgaacttgcggaacggtatgcgtctcgtcgcgaaatcgtggcaggtggattgcgtgaagtcggacttgatgttttcgattcagacggtggcatctacgcttgggtgcatgctcctgaagatcagacgggtgaacagtttgccgacatactgttggaacgtgcggccgtcgccgcgctgccgggcatgtgttttggcaaagtgggcaaggattacgtacgattcagcctgcttaaatccgaggaccagttgcgtgaggctgtgcgccgggtggctgctgtgctagcgtaatttttcctacgtagcctttttgcatggatgagcgattgtgtgcttgcacaatcgctttttctattttcctccgattgtttgcgatcgtctttcgatcggttgtggacgtcccatcctccaattgccatcgaaacgtctttcccttaggaaaccgacacacgctccttatgcaggcgacgtttttgcgattgcggtgcggtgtcttgcatctccgccgtttgatagctgcttacaagaaaatgttatggcgattcgcgcgttctataaccaacgttgataaggtgcggcgcgcgttgaaacgcaggatgcggtttagtgggtaccagcgaccgcgtgaatggcgcgcggcaatgaaccacaatccaagggggtgcacatcatgaccagattcaacactcagcttgtccacggactgccggtcaacgacaacaacaccggagccgtgaatccgccgactacgaagcgcttgatgccgctgtttccgggcactccgccaagggacccgcgcatggttgtccggcgaaggccgtgtatttcgaagttcttaccaatccgttgctgcaggtcaacaatgtgacgaagattgctgaaatcgctcatcgctatggtgcgatttccattgtcgacaacacattcgttaccccgtatctgcagctgccgctcgaccaaggtgccgacatcgtcatccattccgctaccaagtatctggccggccattccgaagtcaacgccggtcttgtggtggtcaaggacgacgggttgggcaaacgtgtctacttcgcgcagaatcgtttgggtggtgtgcttgcgccgaacgaatgcgattcggtgcgtcgtggtattcagacgctcgccctgcgcatggaccgccagcaggagaacgcgcgtgcgatctccagctatctgttgctgcatccgctggtaaaatccgtgcattatccgggattgtcggggcatgagtatgagatttggacattgttcaggaagttgcggatgaggtgacggtaatgaaagacggccatcttgtcgaatatggagctgtcggttccgtgttacgacaccctaaagatgcgtatacgaagatgttgcttgaggcatcgcctaaatttgatgagattaatgcctcgtaaggagtgattttatgattgacaatgcggcaattgatttctatggagccgactggtgcggcgactgccatcgagccaaggcagcattagaccgtttcggggtcgcctacagccttcatgatatcgagcatgaggatggtgctgcagagaaggccattgcgatcagcggacaacagcacattcccgtgattcggttcgccgatggctcatggctggtggagccttcggccacgcagttgcaagccaaatgcaaggaactcggcctgatctgattcaacattgcgtatgccatctcacgagtcggacaaggagaattgtctcctgttcggctcgtagacgtatgtgggtcggcttccggacggtcgatgtccggcttccgaatggactttgcccaactcgcggacattgtctgcacgtgattgcattctttggtaagtttttgcttgggttcggcaatggttgcagaacctacggaaagccgtcaatcaacaggctttcgagagaaaaccaaagaagggagtaatgtcatgccgttccttattacgctccttgtcattgcacttatcgtcgcgttcctgttcctgtccacgttgtttatcgtgccgcagcagcaggcctatattattgagcgtttcggcaaattcaacaaggtgcagttcgccggcattcatattcgaatcccgttcgtggaccgtatcgccatgaaaaccaacatgcgcgtcaatcagcttaatgtgcagttggagaccaagacgcttgacaatgtgttcgtcacggtggtggcgtccactcagttccgtgttgacccgagcaatgtggccaccgcatactatgagctgcgtgatccggctggtcagctgcgttcctacatggaggatgcgctgcgttccgccattcctgcattgtctttggacgatgccttctcccgtaaggacgatgtggcctttgacgtacagaagaccgtcggcaacgaaatgtcccgcttcggtttcactgtggtcaagacgctgatcactgccatcgatccgagtccgcaggtcaagaacgccatggattccatcaacgctgcccagcgcgagaaggaggccacccgtcagcgcgccgaagcccagcgtattcagatcgagacccaggcggcagccgaggctgagaagacccgtcttcagggtgaaggccaggccaactatcgtcgtgagatcgccaatggtatcgtcgaccagatcaagagtctgcaggcagtcggcatgaacgtgaacgacgtgaacaatgtggtgttgttcaaccagtatctcgacaccatgcgtaatctcgcctcgtcgcagaatgcgaagacggtggtgttgccggcttcgacgcctggcggtttcaacgagatgcgcgaccagatcacccaggccatgatgtccgcggacgaagctgcgaaatagtcgcaaaatagccgtgccgatgctctgcatcgatgacaagatgaccttcgtattcgtgttgtgcgaattcttgcgccaaagtgctttttccaacacgtcgtgctccctcaataagcatggcgcgcttgccattcgacgggcttttccaagccatgagtgtttgatatgccttgcgcctgaagagcatggtgtactccttgaaaattaaggcatttacacgaaatgcagagtaaggacagcgcgttttatacacgaaatgcagagtgtcgatacggggcgaggatgtttcgctgacgttccagaggcatgaagaatccctcctttcgagacggccgcttatatgtgacggagagcgcggcggtgaaaggagggattattgtttggcgcgttgccgtaccgcaacgcacgtctatgtgattggcctgtcggcaatgaccgtgttttgcgtacgcatgtcatacgtttcggcgtatgtcacgccatgctgacaagaccttccctggagtttgaattcggcagtgagcagttcatcgcatgtgattcaagcaggtgaagctgtttctgcaggtccatgactttcttttccagccatttgatggtcatggcttgggtgatcaccagcagatcgcgctgcccggaatcggatttgtttgccaacgtctgtgcttcaagcatgattttcggatcggctttccaacgggcgatcgcgcgctcgatgcgcttgcctcccacgattttcggatcaagacctgcgctggcgaaaatactggtaggaccgttgccgcgcagatattgcgccatgcaacgcacctgaaattccttcgagtacgtgatgcggtccatggaagctcgctccaccgcgggcagggtgttcaggtaatacacctcggtttgagtaaaacgacgacgtatgatggttccccttgtgtgatatgcggatgacgcttccgacaacgtcatccgaatgtctgcctcgttgttttcattctatttttgcgagattcggggattttgccgtctggcacgaaacgaagtgtttttggcacgaaacgagaaaaccaccctagttagggttgctttaggaggatgtgagacgggggtctgtgcttctcggggtgttcccctaagggatgcagggaactggaaaacggtataaactcggttgtgggacagacgtattgacgccgtgtgggggagggcaatgaagactatgacagatcatgaagggcaagagtcgatggcggggacgcgcagacccatcatcgaagtcaagaatctgcgtaaggaatatccggtgctcgatgaaaccgtcgtggcgctggaacgcatcaatctcaccattccgcaagggcagatctgctgtatctacggcgaatccggttctggcaaatccactctgctgaaccagctagcaggtatggaaaaaccgaccaaaggcggcgtgctcatcgggggagtgcccatttctcggttgaatgaacggcaattggcggaatttcggcaaaaacatcttggtttcgtattccagtcatacaacctgcttcccaatctgactgccgtggaaaacgtggcaatgccgctgatgttccaaggcatgccgaaaaacaagcgtgaggcaatcgccaagaaaatgctgaaacgagtagggctcggcaaacgcatgaaccactacccgacgcaaatgtcgggcggacagcaacagcgtgtcggcatcgcgcgagcgttcgcagccagaccgcaagtcgtattcgccgacgaaccgaccggcaacctcgactccaaaaccaaaaccgacgtgatgaacatgatctgcgcgttcgctcgcgacctcgaccaaaccatcgtgctcgtcacccacgatgacaatatggcgcaatatgccgaccgtatcgtaacgctacttgacggacgcatcatcgatgaccgtctgatgaacaacgcgtgacggcagagaagagaaggaaattccatgagtaacagcaaccattccgcaaaattcatcaacatgctcatcgcattgatggcgtccatcgccatcgcgctgacctgcattgtgccgacggcgctcgccgaagacggtgatggcactgacgacaacaacggcggctccaccgtgcagccggccggtccggtgccgaacatcatcatcaccaacttcacttatggcgacggttccgtggcggtcggcacgaatttcgatcttggcttcaccttccagaatatgggcaaggtcgcggtcagcaatatggtcgtgaccgttgacggcggcgagaatttcgctatttccggcggtacgaacacgttctattacgattcgctgtgggcgggctattccctgacccagaccgtgcccatgcaggtgctgtcgagtgcgaagaacggcgcgcagggcatcgatatcaacttcaaatacgagtatgtcgatggcggcacccgcaattccaacacttcggatatcaagatttccgtacctgtttcgcagcccgaccgtttcgaactgggcgatcccgtgcttccagacgccatcaatgcgggcgaggaatccaccatttccatggaatacgtgaacaagggcaagggggatgtatccaatgtcgaagcgtccatcgagggtgacggcatcaccgccacgcaagccacgcagtatatcggcaatgtggcgtccggcgcttctggttccatcggattcgctttcactgcggatgcggccggcgaatatgatgccaaactgaaggtgacgtacgaggatgccgacggccagcagcagaccaaggaatcgccggtgaagattacggtgtctgaggctccggctcccgccgatcccggtatggatgttgacccgcaggaaaatcaaggcattccgacttgggtgtggattgtcgttgccgtggctgtcgttgccgtgatcgccattgtggttgtggtggttgtgcgtcgccgcaagaaggcgaagaaggctgccgaggatgacgattgggattgggatccctccgattcgcatgcaggtgctgatgatggtgcggctaatacggctggtgccattgacgcgccgacccaggtgattgattccgtgccctccgacaaggagtgagcatgcgattttcggatattgcacgttcatgcacgcagaatctgctgcgtcgcaaatcgcgtacgattcttacggtacttggcgtgatcgtcggctgctgttcgatcgtgctcatgatttccattggccaaggcatcaacgaacagaacgagcagatgctcaaaaacatgggcaacctgaacgacatcaccgtatatgcggacggcggaggttcacattccacggcaacgtcatccagcgtgagcggtgccgacggcgaacaggcgaaactcgacgatgacgccgtgcagaatttccgcagcattgccggtgtggccggagtgcttcctcagaaaacgatgtcatacagtgtggatgccacgcaaggagctggctcccggtacgtgtcgcaatatgtcaacgtggtgggagtcgacgccacgcaattggaagaatccggctataaattggccagcggacgtcttccgatgcgtgccggcgaagtgttggcgggcaaatccttcgtgtattcgttctacgacaagtatgcgtcagatccgagcaatcatcgtatagaagcgggcggttattactgcgatgagcacggttgcgcccaatccgaaggcgaagacccgttcttcgatatgctgaactccaaaatcacgttgattaccggagccaactatcaaagtcccgacgactaccacaaggtgggcggcggatccgtggcgccatccgattccggcagtggtgagagtcccaccattaccatgccatacacggtggtgggtgtcattgattcctccgccaacaactatgatgcgttcacttccggcattgtgatgagcatcgacgatatgaaaacgttgaacgccaaaatatcgggggacaccaaggccaacacgtcgagcaaggtcgtttacgatcaggtactggtgcacacccaagacatcaaagacgttgccgacgttgaagcgcaaatcaagggcgccggttatcagacttcctcgtttgagcaaacgcgtaaggagatcgaaaagcagtcgcggggcatccagttggctttgggcggcatcggcgcggtgtcgttcttcgttgccgcgattggtattgccaacaccatgattatgtcggtgtcggaacgtacgcgcgaaatcggcattatgaaggctcttggctgctatgtgcgcgatattcgcatgatgttcctgtgcgaggctggtgcgatcggccttgtcggcggtgtgatcgcttgcttgatttccgcgattggttcgataggcatcaatatggcgtctttgggtggattcagcattgagaatatcggcaaagcgattatgggcggcgacgatgtgactcgcatttcggtgattccgtggtggctttttgtggtggccatgctgttttcgatcgccgttggtgtggtagcaggtttcggcccggccaataaggctgtgaagattcccgctttggatgccatcaagaatgatcagtgattgctgattacagatcgctgatttatagattggcggggaatggtccacagatataccgatcattcccgccaattcgcttatgtatcgattattcgctgagaataccgcggattcgagagacgatggtttctgaagtcaatccgtaacgttcgttaagctcgccaagaggcactcggtcggtgaactctttggctgcgccgaaattcagcacacgaacgtgagaagccttggtattactggaattggcataaaatgcggtgactttctcaccccatccgccttctagctggccatcttccaacgtaacaaccaaacgatgcccatcggcaagcatcgccagtaattcggcatcgatcgtggaatattgcaatgcgtcaacaagcgttgcggtaatcgcagcatgttcttcatcattttcggtcagtgccgacgtaatttcggcagccaacggcatggtattgccgagtccaagaatcgccacatccctgccgggctgaacgatctgatagcgggcgaacgggcatgctccggcaatattgacggctggatcatgctcttcggcacgctgcaacgggtcgaacgccatatcggcggcacgttcaagtgcgagaatctgctcgccgggcatacgaatcgccactacgccatgtccggacgggccggtagcccaagccaacatgtcaagcatctgttcgccgctcgcgggagccaaacaggtcacgtcgggaacattggcgaacatcgtcatatcgaatgtgcccgaatgcgtattgtccgcgccggaaattcccgcgccgaaaatcagcagcgtggcgggaacatgattcaatgccaactcttgctgcagctggtcgaacgtgcgttggaagaacgtggcggaagtcgcaagcaccgggcgtccgccagccctggcgatacccgcggcgaatgcggcggcatgttcttccgtgataccggtatcgacgtagtgggcgccggcacgttcacgaaaatctcgggtgatgccattcgatccgggggttgcgggggagatgaccaccaatcccggctcattgtcgaaacgacgttccagcgatgccatggccatttcgccataatatttgcgtgcgtcgagcggtttgccgagcgaggcctccggatcctgccaatggttggcctcgcattggcccgcatgaggttgaggattggtctgattgcagccatccgaaccattgtcggcttccgtttcgtcattgaagcccaagcctttggtggtgtggatatgcactacgatcgggtggtcaatgtctttgacctcgttcagtacttccaccagcgcgtcaacgtcattaccctgctccacatagcggtagtccaagccgaatgccttgaacagattcagttcggccatgccattcgacgtacgcaacttggcaagctgcccgtacataccgccgaaatcctcagcgatcgacatttcgttgtcgttgacgatgatgatgagattaccgccctgttcggccgcattgttcagcccctcgaacgcaatggccgaactcagggatccatcgccgataatggcgataacattgccgatagtgctttcgccggcggcgccgcgctgcatatcgcgggttttggcaagaccgcaggccagagaaatcgaagtgccggtatggccgagcacaaaggaatcatgttcgctttccagcggattcgtgaaaccggtcacctcatcaaaacgagattggtccaagtatgcttcggcgcgtccggtaagcattttgtgcacgtagctttggtgcgacacgtcgaaaatgaaacggtcgcggggcgagtcgaacacgcggtgcaatgccacagtgagctccaccacgccaagattcgagccgatatgcccgccatgttgtttgccgtagtcgagcagcgtggcgcggatttcgaggcatagatcgcgtaattgctgggctgaaagggcatgtacgtccgccggagtgtgaatcgaactcaaaatgccagcggtcatcgtgcgcaatcacccttccctacgatcagtgcaaccaagtgcgaaatcatatcccactgtatgccccgacgagggtgtttgcgggcaaaggagcgcaaagtcttctcaacttgaggcacaatagaggtgtttgcaatcgtgaaaagccgttattcgcaaaggagcgtgaacatgaaagccgtatatgccaccggaacgaattatgatgatccgctgtccgtgcttgaagtgggcactatgcctgagcctgaaaccaagccattctggtccaccattcgtgtgaactcggcgagcgtgaaccatcatgacgtgtggagtctgcaaggtgtggggctttccgacgagcagacgccgatgatcctcggcacggacgcggctggcgtgttggaagaagacattcccgtacgaaagggacttaaggccggttccgaagtggtcttgtataccttcgttggtaccgatggcgccggtgtgatgccgggggagagacgctcgatcctgtccgaacggtatgcgggaaccatggccgaatacacacaggtgcccagcgccaacgtgttcgccaagcccgcgaatctgaatcttgatgaggctgccgcattgggtaccagctggcttaccgcatattccctgctgttcgcatcggcgaatgtgaagccgggagacacggtgcttattcaaggcgccggaggcggcgtgtcgaccgcggcgattcagcttgctcacgcggccggattggaagtgttcgtcacgtcacgaagcgaagacaagcgtgcgcgagtgttgcagctcggtgccgatgcggcttttgaaacgggtgcgcgactgccacgcaaggcggatgccgtcattgaatccgtcggcgcggccacatggagtcattccgtcaaatccgtacgtccgggaggaactatcgccatttgcggcgcgactactggcgaccagccgggtgcagagcttacgagaatcttcttccaggatattcgagtgcagggcaataccatgggctcccgtgaggatttcgcacgtttgctgaaattcgtggaacatgccgatctgcatccggtcatcgattccgcatatgcgatcgacgacgcgcatcttgcgttctccaagatcgtgaatggcgacgttttcggaaaaatcgtgctgcacatctagccgattgcgtaaagtaaacggtgttcaagaacatgttcttttggattctttcggaggtccttgatggcagacaacaagcctgaagtcgcagtgattatggggtcggcgagcgattgggaaaccatgaagcatgcctgcgagatgcttgaccagttcgaagtgccgtacatgaagcaggtgatttccgcgcaccgcaccccggaattgatgggcgagttcgcgcatagtgcccgtgccaacggtctgaaggtcatcatcgccggagccggcggcgcggcacatctgccgggcatggtcgcggcccagaccaccctgccggtcatcggcgtgccggtgcgttcccatgcgctgtccggttgggattcgctgctgtccatcgtgcagatgccaggcggcatcccggtcgccaccaccgcagtcggcaactccggtgccacaaacgcaggtcttttggctgtgagcattctgagcaccaccgatgagcgtttggccaatgctttgcaggaatatcgtgactctctgaaggaaaaggtggctgaatccaatgcccagcttgtctgaggaaaccaatggccgtgttgaacgtctgatgccaggggccaccatcggcattatcggtggcggtcagcttggccgcatgatggcgttgtccgcccgctacatgggcttccgcatcggcgtgctcgacccgactccggattgcccgaccgcacaggtggccgacttccaagtcactgccgaatacgacgacatcaccgcgatccgagaactggctgaaaagtccgacgtgctcacgtacgagttcgaaaacgtgaacgccgacgccatcgacgaagtgcgttccttgtctgcagccccgcaaggcaccgatttgctgcgtgtcacgcaggatcgcgtcaacgagaagcagttcatcaacgatcatggcacgccgaccgcaccatggaaggccgtcaacagcgttgaggagcttgatgcggcgctcggtgaaatccattacccggccgtgctgaaaacccgttccggcgggtacgacggccacggccagaccgtgctgaaatccggtgccgatctcgaaaaggtacgagcccgtgccgatcgcggtggcggattcccgccgagcattctcgaaggattcgtcgatttcgcattcgaagcgagcattctcgttgccggtaacggcaaggattatgtgaccttcccgatcgtgcgcaacgagcatcgtaacaatattctgcacatgaccatcgctccggccgaagtcagcgaagacgtggcgaaggaagcgcacgaactcgctttgcgtttggcgcaaggcttcgaactggccggcatcctcgctatcgaactcttcgttaccaaggatgagcgggttatcgtcaacgagcttgcccctcgcccgcataactccggtcattacaccatcgaagcgtgctcgttcgaccagttcgacgcgcatattcgaggcatcgccgggtggccgctcgaacagcccgaactgctcaagccggctgttatggtcaatgtgctcgggcagcatgtggcaccgacccgcgcgctgatcgccgagcatcccgaatggaatatgcacgactattgcaaggctgaagtgcgtcatgatcgcaagatggggcatatcaccgtgctgaccgacgacaccaggcaaactgtggcggatcttgaacggaccggctgctgggatgatttgaaataaaaccgatgacggcatgtttcgcgcgtcagcctttccctgaggggagggcggcgcgcgaagccatcaagaacggacatagattgacggacggacgcgtggagcgcaacaccaaacaaaaagaactgattcatgatgcgttgaaggcaaacgatgaattcatttccgcacaggatttgcatcgcaagctggaagacgaaggcgtgaaggtcggccttgccactgtatatcgtcaattgaatgccttggctgaggcaggcgaggctgataccgtgcgtttggaaggccagcagctgttccgtctgtgtggtgatgacgggcatcaccatcatctcgtatgcacgaattgcggcaaaaccgtggaaatcgaatcgccatccgaaacttggctgcgtggcatcagcgagaaatacggattcaccatcgaacggcatacgcttgaggtgttcggactatgccccgactgccggaatgaggcacgacggtaattccgtcgatctcaacaatttcgccgatttcagcaacaacggttatgtggacggcggaatccttgacgacaactagatactgccatccgaactgtctataccccctcatcgttcttttgcgatttcatcggcatatgcgtaagaaaatcagaagaaactgtggatgaaatcgatcattacagctttttgtcagatatggtcgcgaaaatagtgccttggcgtcgccgtaaggcgggaaacgaagcgaactgacacgttacgagtggagataaacacttgacgaacgaatccgtgaatacagagacgattgaggaactgaggatctcgacgattgatccaaacgcacccgccaaggaacgtaaggaattcccagggtggttgtacggcatactgtttgtggtgttcgacgccatcggcgtggcagcgctacagattggcgtcagtcaatccgctacacgcgtcaagctttcgaacaacatgtggctgaccggttggggcttcgtcaccaaaatgttcaccaacctcaactttgtggcggtgcttaacctgattttgtggggcgtgctgtatgtgatactgctcatgctcatcaaccgcttctggatcgccacgccaatatttctggcggtgacattcattatcgcggtgatcgaacatttcaaagtatccatccgatatgaggcgattcttcccagcgatctgaacttcctcaaagccgatgcgggcaatcttatgagcttcatgccggcaggcgcacagtggaccattctgctcgccgtcgtcatattcgttgctttcattgcgcttttcgtattcctgaatcatcgtgacggccgtcacggcaagcttttccgtggcgacgacaagcagtcgcgctcgctgaatgccatcgtgcgactactgctgatcatcgtgccgggaacgttcttcacgctgtattccatgcaggtgagcactgtcggatcttgggcgaaaaccttctcttcggcaatgggggacatgccgtccatgtgggattccgtctacgatgcgcagcgcaacggaccgatggtcgccttcaccaggcagctgaatccgaaagtcatggtgaagcctgacgactattccgaagaaaccatgaaggaagtcgcggcacgatacgaaaaagaagcgaagaagatcaacgcatctcgtaccgagaacatgaccgacagtacggtgatctatgtgctgtccgaatccttctccgacccgtctcgcgtgccggggcttaaggtcaacaaggattccatgcccaacattcgttccatcaaagagaatacgacctccggtttgatgctttcttccggatatggcggtggtaccgcaaacctcgaatacatgggattgacgggtttgagcatgtcgaatttcgattcgtcgctcaccagcccgtatcagcagcttgtgccgagcgagcattggacgccgaccatcaaccagctgtggggggcgtcgaagaattccatcggactgcacccgtacgaatcgtctatgtactcgcgtgcgaccaactataagaagttcggattctcgcatttctacacgttgaccggtccggacgtcatctcgcatcaagacaagatcgacgattcgccgtacgtgtctgacgaagcgacgtacgagagcaccatcgaagaagtcaagaaaaccgatggcaaccagttcctgcaggtcatcaccatgcagaaccacatgccataccacgattggtataagaacaacgatttcaaggccgaatccactacggacactcctttggaggacgatgagaaggagtccatcgaaacctatcagaagggtgcggctctgaccgatgaggcgaccgccgacttccttgacaagctcgacgccatcgacaagccgatcaccgtggtgttctacggcgatcatctgccgggcatttattcgtccgcttccgaagacgacaacaattcgcttgccttgcatctgacggattatttcatctggtccaacaaggcgtccagctcgcaaggcaacgagatcgacaacgccgactattcgtcgccgaacttcttcgtggcgcaggccgccgagcatatgaatgccaaggtgtccccgtatctggcgttcctcacgcaaatgcatgagaaaatctccgccatggagccacctgtcgtcaacaatatccagggatgggaccgtatccctgaaggtcagaacatctatctcgacgctgacggcaatcccatggccgaaagcgacttcgacgcggaaacccagcagttgcttgccgactaccagctgattcagtacgatatcaccacagggaagaactacctgaaagacaccgatttcatggatcttccctagaggcaagggggaagagatggccgcaaccgatcgcgaacagcagattttggcgtggattaagcagaatcctttgatcagccaaaacgagcttgcggaactgtgcggcatcacccgttcaggggtggccgcgcacatctccaacctgatgaaaaaagggtacatccaaggcaaagggtatatcgtcactccgcccagctatgtggctgttgttggcgccatcaatatagaccattacggtgtcgccatgcaggatgtggttggggaaagttccaacatggggcgcattgtgtcatccgtgggcggcattggttacaatatcgcctacaatctgaaccggcttggcgtgccgaattatttgatttccgtctatggtgatgatgagaacggtgaacgcgtcaagcaggacgcgtatgccaacggcattgacatcacgcatgccaagcagatttcccatatgcctacttccaccttcttgtcggttgtttccgcgcaggggcgtcagattgtgggtcttgatgatatgcagatcagtgcggaaatcaccccggaatttctagcgcaacgagagcagaccatcgtcaatgcggaaatggtggcgattgattcgagcttgccgtctgatgccatagcatgggtttgcgaaaaaacaagtcgaccgattttcgtgcgcgtggtttccgttaataaagcggcgcgaatcacgccggtgctcgatcgtatcgacactatggtgcttaattccgccgaagccaaattcgtgtcggggattgaggtgcatgacgaggccagtgccagagattgcgccgaacatttgctgcggtccggtgtgcgtaatgtgtttctttttgtggatgattcggacatgctgtactgctgcgaacatgaaagctttttctggtctttgccgggaagggcggaggaacgtcgatataccaatggtggtgcgtcggcggcgttgagtgcgctggtgtgggcgcgtcgtgagcataaaacacagcgggaatgcgctagatatgcgtctgcggcggctgcgatgaatatgtctcaggtgcagtcgatttgcgctgatttttctgaagaagctgtgcggcgcaaagctgatttgctgcagtaacgcaggtatggcggtcttacatttgtttctttcgtaatcgcgagacacgcgatttttccatatgttacatcgatgaaatataagcaaaagttgactggcttaaacttttgttgtactctaaattgaagataaaacgtttcatcaagggtgtatcaaggcagatatatccccgaaaatgtaggaggcaatatccatggcggatatgacttcaggaaatactgttcctgaccgttacgttgtggtcatcggtggcatgaacatggacatctgtggtagaccgacgagcaccgtagtggaccgagactcgaatccgggcgtcgtcagcatgtccgcaggtggtgtcgggcagaacatcgcacagaacatggctcatctaggcatgccgacatacctgatcaccgtctacggcgacgatgaaaacggcaagaccctggaacgttcgtgcgcggccaacaacatcaatcttgactatgccgcacagctggaaggacgccgttcttccacctacatgttcatcaccgacgatacgggcgatctgctggtggccgtcaacgacatggaaatctgcaaggaaatcaatccggcattcctcgaatctcgcctcgacttcatcaacggtgccgccatctgcctgcttgacgccaatcttgaaccggaaaccatggcatggattggcgaacacgtcaccgcgccactgttcggagacaccgtttccacagtcaaagcgcaccgtttcgacacgatcctcaacaagatgaccgtgctcaagccgaatgatttggaagcatccgtactcaccggcatcggtatcgccgaccagtattcggcaggtgccgcagcgaagaccttgctcgacaggggcgtgaagaacgtattcatttcattgggtgccaacggaatcctgtgcgcgagacacgaaaacgacgaatacagcttcaagcatgtgccgccataccgtaccgaaatcgccacggcaaatggggccggagatgccggcatggcagccatcacctggagcttcttcgataaccccgatcgagatcttgaagaagtcggcaaaattgcgcaggcagcatccagcatcgcgctcgaatgcacaaaagcagtgcccgatatcaccgtggaacgcatacgtaagaagatgtccggcgagatcgagccgttgctcgacgaagtgcgtaccgcctgaattttgctacatcacacgtccatcaacccatacaaacacaaggagaaccgacaatggtagtcaagcagatctattctctgatcgaatacgatgaggccgtcaaaaccatggaggctggtgccgacaacattggactggtgccgatgcagaatggtggcgttccggcacatcgcgtgccaatcgaacgcgtgcaccgcattttcgacgaatgcaagcgtcgtggcgtcacctccgtggccatcatgctgaccaacgatcccgacgagatgatcgagcttgccagagaggtgcggcctgacattctgcatatcgctggcgatgggtacgccgcagatgaagcattcgcggcccgacttaaggaagccgctccgaacaccaaactcatgcaggccgtgctcgttgacgatgaatccgccgtcgaccgtgccaagaagtacgcacaatactgcgatctcatcctcacggactccggtctggcccccgacaccggcattggtgccagcggtctgacccacgactggagcattgacgcccgtattgtggccgaatgcggcaagccggtcatcatggctggcggccttggaccagacaatgttgccgaagccatcgaacagtgcaagccgcatggcgtggactccctgacgaagaccagcatcaaatacgacggcggctacatggagaaagacatcgacaaggttcgtcaattctgcatcaatgccgacgctgcggccgcaaagatcggacagtgaccgatggctatggaagtcaaactgctgcaacccgtcaaagtggtctgcactgacgatttaggggagactctggtcgatatcatgcagaccgcgggctattctcgtccgctgatggtcacggattccttcgtcggaagcatgccgctggtcgttgccgcacgtaccaagcttgaacaggtcggtgtcgatgtggcggtattcgaccaggtcaagcccgacccgctttgcgaaaccgtggaatccggcgtcgaagcattcgaagcgcataaggctgacagcatcatcgccatcggcggtggcagttccatggatgttgcccgaggcatcaacatcgtgcgtgtcaacggcggatccatcatcgaatacaccgatccagccaagccgatcgcaccatgcaacggtatgatcgcagttccgaccaccgccggcaccggcagcgaaatgtccaacgcgctggtggtcaccgaaggatccaccggtcgtaaactcgcggtgcttgccgatccggcagtcagcgaatatgccgtgctgaacgcggatctcatgctgacactgcccgcaaaaatgaccatcgcttgcggacttgacgcattctgccacgccgcggaaggatacctttcccgaatggcaagtccggtcacggatgccatttgcgaaaaagcgatgttcctgctgtacaactatctgccgcgtgctgtggcaaacggtcaggatcgtgaagccagggaacgtgtgatggtcgcgtcgacgcttgcaggatggatgctgaacaatgcgggaaccattgcggggcattccatcgcacacgtgctcggagcgaaataccacatcgtgcacggtgaagccgttggctacgcgttgccggcggttatggagttcgttgctcccgtacgtgcgcataaggttcgtgagatcggtcagattctaggtgcggtctacccggaaaatgcgccggacgagcaggttgcgattatcgcaagcagagcgttcaaggatttccgcgaccgcatgctcggtctgcatcctgttgaggattacggcatcagcgttgaagaactcgtttccaatgcgcaggccgtagttgacgagcgttttgcaggaaacacacctcgtgacatcgatcttcaggcagccgaacaactgctcgaaggtttcggaagtcgctgatatcaaaggccattgccggccttgcaacaagttgtgtgaccgatgagccggagtcagtcaatcgtcgaccacctcattatcggttcaaagttggagcacataaggaggaaccataatgtccaagaaaatcatccttgattgcgatccgggacatgatgacgccgtcgccatcctgcttgccgtgggcaatcccaatatcgatctgctgggcgtcaccacggtaggtggcaatcagagccttgacaaggtgacctacaacgcccgtgcagtgctggaaaaggcgcatgccaccgatgtgccggtgcatgccggatgtgaccgtccgctggtgcgcaagcaggaagtggcagcttccattcacggcgaaaccggtcttgacggcgttgaactgcctgaacccagtcgtccgctggaagccggacatgccgtcaactggattatcgacaccattatgagcaacgagccaggcaccatcactctggtgccgaccggaccgctgaccaacattgccatggctgcccgcatggagccgcgcattgttgaacgtgtcaaggaagtcgtgcttatgggcggcggataccatgtgggcaactggagtgccgtggccgagttcaacatcaaggtcgatccggaagccgctcacatcgtgttcaatgaagcctggccgatcaccatggtcggattggatctgacgcatcaggcattgtgcacgcccgaagtgcagcagcgtatcgaaggcgttggcactgatctcgccaagttcgtgtctggtctgatggacttcttccgcaagacctatcaagacaatcaagatttcatcgatcctccggtccatgatccgtgcacggtggcatacctcattgatccgagcgtcatgaccacccgtcgttgctcggttgatgtcgaaatccatggagatctcacacttggcatgaccgtcgccgacctgcgaggtccagagccgagcgccgaagaatgccacacccaggttgcagtcaagcttgatttcaacaaattctgggatttggtaaccgacgcaatcaagaccatcggctgaaagaagagaaagataagtaaaggggtgctctaatgacagagaccaaaaacagcaaaatgctcgacgaaggcggcaagtccgtcgtcgcattgatggcagcattgatggcagccatcttcgcgttccagctcaacgcgtccatgctttcgcctgcattgacgaccatgcgtgttgaactcaacaccaccgatgcgcagattggcttgacccagacggtgttcttcacctcgtgcgcagtgttctcgctgttcctgccgcgactcggcgatttgatcggtcgcaagaaagtgctgcttggcattcttgtgcttaccgctttgggctgcgtggtttccgcgctcgcggtcaacgtgccgatgctgatgatcggtcgtgtgattcagggtgttgccggtccgattgtgccgatgacgctgatcatgctgcacgccaaggttactgaagataagaagtacgccaagctcatggctattctgacttccgttaatggtggcatcggcggtgtcgacgctattcttggcggctggcttgctggcacgttcggtttccgttccgtgttctgggtcatggttggcgttgcggtgcttgccattgtgcttgtgttcgtgtatgcggaagaatccaccgcttccgagactccgaagatggattgggttggcgtggtttcccttgccgccgcattcttggccgcatatctggctatcaacgagattcagaagctgggctccgccaattgggcgctggtcgctgtcgaaatcattattgcagcagtgctgttcgtggtgttctggaatgttgagaagcgtcagaaggctccgatggtcaccacgcattacctcaagcagcgtcgtacttggggtctgctgctgaccaccctgcttaccatgaccggcgtgttcgccatcatgaacggtatcgtgcctgctctcgctcaggataccgaagtcggcgccggcatgagcgccagcgtggtatcgttcgccaccctgactccgtatgcgttgatcggtctcgcattcggtccggtcgcaggcgtgctcgcttcgaagttcggctaccgtgcggtgctgcgtactggcttgatcgtctctgttgtgggcgtgctgttcggcatcttcgtgtgcaacgttccgagcatctgggcacttgtggtcatgtctttggctttgggtgtttcctacgcaggtactgccaacatcatgctgaacggtctgggcatcgtgctctctccggaagacaatccgggctacctgcctggtctgaactccggtgcattcaacctgggtgccggtctgagttatgcagtgctgtacgctgctcagaacgcgttcaccgcatccggcggtgcgaccagcggctacatcgcagccatggttggcggtgtgattctgctcggcctcgcgttctgcgcatccctgctcattccgaagccgggagagcagaagtaatcaatataagcttgcctgtgttgtgtgattaaaaaacggcggttttgcagtcggactcctctctgtccgaccacaaaaccgccgtcctttttatatatatgattgcgattgtatggttacagacatttctgatggtatgcaatcgctgggtgcattcagatgttcagtgccttggcgccgatgtcgtgacggtagaacatgcccttggtatcgagctggtcgataatcgcatacaccttgtcttgagcggccttgatgtcggctgcggaggtttccaccaacagcacgcggccggaattggcgaccagaccttcttcgctacgagccacgccagcgtaatagacgtgggaatcctcatcgactggaatctcaggaatcgcagcgcccttgatcacatcgacagggtagccgtcggcggcgagcaccacaccaagcgtggcgttgtcattatcccaagtgaactccggagtctcgccattgagcagagcgctgatgccggcgccgagatcagacgtgagcttcggcagcacgacttccgtttccggatcgccgaaacgagcattgaactcgataaccttcggaccatccgcggtggcgatcaagccagcgtaaagaatgcccgtgaacggcgtaccctcatcggacatagcctgcacggtcggcttcacaatggtttcgatagcggtgtcaaccacatcctgaccgatctgcggaacgggactgtacgcacccatgccaccggtgttcggacccttatcgccatcataagcgcgcttatgatcctgagaaatcggcatcggccagaaatcggtgccattcacaaaactcatcagcgagaactcctgaccctccaagaagtcctcgatgacaaccttcgcaccggcgttgccgaaacgatgatcgacgaaaatgtcttcaagagcggcgatggcggtttcctcatccatggcaacggtcacgcccttgccagcggccagaccatcagccttgatcacaatcggagcgccatgttcacgcacataagcggtggaacgctccaaatcgtcgaacgtctgatacttcgcagtcggaatgttgtgacgttccatcaactgcttggcgaaatccttggaaccctcgatttgcgcggcggccttgctcggaccaaacgccttgatgccagctcccgcgaaatcgtcgacgatgccctcgataagcggcacttccggaccgacgaacacccagtcgtagccgttgttcttcacgaaatcaatcagcgcggcatgattggacgggttgatctgcgtggtgcggatgccgtcaagctccatgcctggattgcccggagccaccgtgacttcgctgacgctgccgccgcgcataagtgcatgggcgatggcatgctcgcgtgcaccggaaccaatgaccagaaccttcatgtttcctcctgttgtgtcccttttgggaaaatcctatgttcaggaaagtcttcggaaataaaagggggtggccgttatggctcacccccgtatatgtatttactgcagttcgacgtcgctatcggtcttcttgacgatattgccgagtacgtaaccggcttcgtcattggacttgagcaattccatggtcttatcggcatcttcggcgttgacggccagcaccataccaatacccatgttgaagatgttgaacatttccatatggtcgacttcgccggccttttcgagcacgtcgaaaatcggcagtaccggccaggagccgaggttgatgtgtgcggccagaccgtccggaatcatacgcggaacgttttcgatgaagccgccgccggtgatgtgggcgacacccttgaccacgccggccttgaacagcggggagagggccttcacataaatcttcgtcggggtgaggagcacgtcgccgagcttttcgccgtcgagctcgtcaagcacggtatcgacggtatagccagccttctcgaacagggccttgcgcaccagagagaagccgttggaatgtacgccggtggacggcagaccaatgagcacatcgccctcagcgatggtggagccgtccacgattgcggacttctcggcaacgccgaccgcgaaaccggccaaatcgtactcgtcttcgtcatacatacccggcatttcagcggtttcgccaccgatcagaccggaaccagcctgtacgcagccgtcggcaacgccagccacaacctgctcgagcagtgctggatcgttcttgccgcaggcgatgtaatccaggaagaacaacggttccgcaccctgagcggcaatatcgttgacgcacatggccacgcagtcgatgccgatggtgttgtgcttgttggccatcttggcaacgaccagcttggtgccgacgccgtcagtgccggaaatcagtaccggctccttgtatccgagggaagccagatcgaacaggccgccgaagccgccgataccgccgaccacgcccggacggttggtgcgcgccacatgggacttgatgcgcttgacgacttcgtaaccggcttcgacgcttacgccggcttcctcatatgcttttggcatatcaaacctttctcgggttcagtgttcttcttgggatgaagtagtggtgtattcgttgccctcgtacttgcttttatacaaggcgaattcaggcagacgcacgcgatcttcaggagtaagggacttcaaaaaatcactttcataatcgtcgagtgcggtcgggtagtcgccattgaagtaggccacgcacagaccgccgtacggggcgtccgcacccaggccgatagattcgaccaatccgtcgagtgacaggaacgccaaggaatcggcgccaatgaaatcgcgaatttcttcaacggacttctttgcggcgatgagctccttggtggtggagatgtcgatgccgtagaagcacgggtacttcagcggcggcgagctgatacgcatgtgcacttcggcggcgccagcttccttcagcagctgcacgatgcgcttggacgtggtaccgcgcacgatggaatcgtcgataacgatcacgcgcttgcctttgaccacgccgcgcacggcggacagcttcatgcgcacgccctgctcgcgcagttcctgcgtcggctggatgaaggttcgagccacatactggttcttgatcaggcccatctcgtttggcagaccagcttcttccgcatagccggaggccgcggacagcgaggaattcggcacgccaatgaccatatcggcatcgaccggcgattcttgggccagacgcgcacccatacgcttgcgggcggaatgcacgtttacgccgtaaatgtcggaatcggggcgtgcgaagtagatgaattccatcgagcagatggccaactgggtctgattggtgtactgcacgatcttgtagccgtgatcgtcgataaccacgatttcgcccgggcgaatattgcgcaccaattcggcgccgacaacgtcaagcgcgcaggtttcggaagcgagcacataagcgccgtttttcatcttgccgagggaaagcgggcggaaaccgttcggatcaagcgcgccgatcatggcgtcttcggtcatgatcaggtaggcgaaaccgccatgcacggtgttgagcgcttccttgagcttgtccatgaacgtacgctgtgtggagcggcgcaacaggtgcatcaacacttcggtgtcggaattggagtggaagattgcgccttcgtcttccaactgacgcctcagagtcgggcagttcgtcagattgccattgtggcacaaggccatatcgccgtcatggaagcggaagatgaatggctggatgttgtcggtgccgcctgaaccggcagtggcgtaacgcacatggccgatcgccttgtctcccttcaggcgttcgatttcgcgttcgtcgccgaacacttgggtcaacagacccgttccgcgatgaccgatgagatgaccgttatcgttcgagacaatgccggcgccttcctgaccacgatgctgcagcgcgtgcaggccgaagtaggtgagtcgggcggcgtccgggtgaccccaaacgccaaaaataccgcattcctcgtggatgtcttcgagttcagctgacaagccaaagctccttccaaaaccatggagacaagggattcgctaccgttcaacactaccaaccggaggctacaattggcggttttcgtggagtccttaggggcacttggcatgtcggatgtgtcgaacaattgttcgaactctctgatatgctgaatgcaggaaaatacagtgcggtgcatcggcgatgctttgtcggtgctttgcgaggcgaagtgctcgttgacgtttcaagatggagccaaatcatagaaggagtctgaagatggccgaacgtacctatatcgctatcgatctgaaatccttctatgcgtcttcggaatgtgcggaactcggattcgatcctctatccacgcatctggtagtggccgaccaatcgcgcaccgacaaaaccatctgtcttgccgtgtcgccatcgctcaaagcatatggactgccggggcgggcgagactgttcgaagtcaaagcgaagcttaaagaagtcaatgctgcacggcgggcagcggcaccgggcggtgtgctgagaggtgaatcgtatgatgcgaaagcgctcgcagctaatccgaatctggctgccggcgtgtatatagcgaagcctcgaatgtcgcattatctcaacatcagtgcgaaaatctacagcatatatttaagatacgtatccgaagctgacattcatgtctattcgatagatgaagtattcatggatgttaccgggtatttgcgggcttacggcaaaagcgcgcatgatatggcccgtgaaatgatccagcagattcttcgggagacgggcatcaccgcaacggccggtatcggtacgaatatgtatttggcgaaagtggctatggacgtggtcgccaagcatattcccgcggataaggatggcgtgcgtatcgcgcaattggatgagatgtcgtatcgtcggctgttatgggcgcacaggccgttgactgatttctggcgtgtgggacgagggtatgcgaagaagctcgaagcccaaggtctaatgacaatgggcgatatagcccgatgttccataggccgtgccgacgagtattacaacgagggcctgctgtacaagatgttcggtgtgaacgccgagctgcttatcgaccatgcgtggggttgggaaccttgcacgatcgccgacatcaaagcgtataagccagctggtcatagtatgagttcggggcaggtgcttacgggcgcggtcggttttgactcggcgcggctgattgtgagagaaatggcggacaccttgtctttggacttggttgccaaaggtgtgaaggccggccatatggggttgatggtcggttacgataccgccagtcttgatccaaagcggctaggggagtgtggcactccggaattgaaggcgatggctgagcgagccattgccgaatatagcggtcccgtaactcttgataggtatggtcggcgtgtgcccaagccggctatagggtcgattggtctgggcgaccatacgtcatccaccacgcgcatatgcgatgcggttgacgaattgttctgcagaatcgtcgatcatcggctgttggtacgtcgattgaatgtggttgcttctgatttgcaaacggtcgaacagctggctgagcggaatgctgcggcgaattacgttcagcccgatctgttttcggatatgcaggaagtctcaaatggaagcgatagcaacgattgcagtgataacgtcgataacaacgcgcggtcttcctatactgacgatatgcaggttgtcgatgagatttccgaacagcatgtgcaacagacgattcttgacatcaaacgcaagttcggcaaaaacgccgtcatcaaaggaatggacatgttcgctgatgccacaggtcaacagcgcaaccgacagattggaggtcatgcagcgtgagtttgcagcaaaccgaccgttacgatgacatcatcaacttgcctcatcatcgctcgcgcacgcgtccgcacatgagcatgcacaaccgtgccgcgcaattcatgcctttcgccgctctcaccggctacgacgacatcatcaaacaagccgccacccattccaacgaagcagtggaacgcgccaacacccccgtcaatctctccgaaggctacctctccgcctaacatgcgtcggagaccaaaaaagaggctgtctggtttgattagggaggaatcccgatcaaaccagacagcctctgtatgttcgaagctacgtcagaacgcttttatagatgcggtcgtggatcaggcggcgaagtactccacgccggctgcgaacagcggctgatccttctcgccgggcacgttcttgaacgtaccgttgctgtaacgctcggagtggcccatcttgccgaacacgcggccgtccgggctggtgatgccttcgatggccagcagtgaaccgttcgggttcacgctcaggtccatgcccggcacgccggcctcgtccacgtactgcgtggcgatctggccattggccttgagctgggcgagcatatcgtcggaagccacgaaacggccttcgccgtgggagatggcgatggtgtgcatgtcgcccacctcggtctttgccagccacggggagagattcgacgccacgcgggtgcgcaccagacggctctggtggcggccgatggtgttgaacgtcagcgtcgggcattcggcggtcatcggcacgatgtcgccgtacggcaccaggccgagtttgatcagcgcctggaaaccattgcagataccgagcatcagaccatcacggttgttcaacaggtcacgcaccgcttcggtaacggcaggagcacggaagaacgcggtgatgaacttggcggaaccatccggctcgtcgccgccggagaagccgccaggaatcatgatgatctggctcttcttgatttcctcaaccaaagctgcggtggactcagccacagcagcaggggtgaggttgttcacgatgagcgtgctcacgtcggcacccgcgcgctcgaaggcggctgcggaatcgtattcgcagttgttgccggggaacacggggatgatcacatgcggcttggcgacgccggcgccggtgtatatggtcttcttcggcgcattgaaggacacggtctcaacggtcttgcccttttcgtcgcccttggatcggtacgggaacacggattcgatgccgccctcccaagcgtcctgcagttcggccagatccagcgtctcaccggctgccacgaactggtaggcctcggtggtctcgccgacctcactgacctcaaccaggttggatacggccggaaccttcgcggtgtcggcaagttcgatgatgaaggaaccataggccggggcgaacaggtcgtccacgctgatgccatcggccagcttcacgccgatctggttgccgacagtcatcttgaagatagcctcggcggtggcaccgtagccaggcgtggacacggccagcgcatcgccgaaatcggtgagctcctcgactgcggagaacacctccagcagcgaatccttgtccggtgtgaggccgtcggcctggtaacgcggcgcgatgcggatcacacggtgaccagcgcccttgaactctggggaagtggcacgcttcatgttgcccacagccacggcgaaggagatcagggtcggcggaacgtccagctgttcgaacgtgccggacatggagtccttaccgccgattgcgccagcgcctagatcgacctgcgccatcagagcgcccagtacggcggccatcggcttgccccaacgctccggctcgtcgcgtagcttctcgaagtattcctggaagctcagatacgctttctcatgttcgaaaccggcggccaccagcttcgagagcgactcgaccacagacagataagcgcctgtgaactggttctgctccatgatgtacgggttgaagccccaagccatcgcggaggcggtggtggtctcgccgaacaccggcagcttggcgaccatggccatgttcggggtcagctgcttcctgccgccgaacggcatgagcacggtgcctgcgccgatggtggagtcgaaacgctcggaaagacccttgttggaagccacgttcagatcggtgagcatggcatgcatgcggtcagacaaggaaccggaagcccacggggtggtgtaggcctgctgagcttcgacatgcaccacctgatgcttcggagcgccgttggaggcgaggaactcgcgggacagatccacgatcgtgtcgccgttccataccatcgtcatgcgcggctcttcggtcactgtcgcgatgacttcggcctcgagattctcttccttggcgtagcccaggaactcgtccacatcctcggcggccacgtccacggccatgcgctcctgggattcggaaatcgcaagttcggtgccgtccaggccctcgtacttcttcgaaaccttgttgagatcaacatacaggccgtcagccagctcgccgaccgccacggatacgccgccggcgccgaaatcgttgcagcgcttgatcagacggcatgcgtcaccgcggcggaacagacgctgcagcttacgttcgacgggagcattgcccttctgcacctcggcgccgtcaagctccagggattcgacgttatgcgccttggacgcgccggtggcgccgccgatgccgtcacgaccggtacgcccgccgagcaggatgaccttgtcgcccggagccggggtttcgcggcgtacatgatcggccggagtcgcggccacaaccgcaccgacctccatgcgcttggccacatatccggggtggtagatttcgtccacctgaccggtggccaggccgatctggttgccgtaggaggaataaccggcagcggcggtggtgacgagcttgcgctgagggagcttgccttcaagcgtctcggacaccggcacggtcggatcggcggcaccggtcacgcgcatggcctgatacacgtaggaacggccggaaagcgggtcgcggatgcagccgccgatgcaggttgccgcaccaccgaacggttcgatttccgtcgggtggttgtgggtttcgttcttgaacaggaacagccaatcctcatcatggccattcacatcaaccttcaccttgacagtgcaggcgttgatttcttcggattcgtcaagattcttcagaataccgttcttcttgagccacttcgcgccgatggtgcccatatccataaggcatacgggcttttcgtcgcggccaagctcgtgacgcatctcaagatacttatcgaacgcggcctgcacggtcgcgtcgtcaatctgcacatcatcaagttgcgtgccgaacgtggtgtgacggcaatgatcggaccaatacgtgtcgatcaccttgatttccgtgattgtcggatcacgctgttcctcggtgaagtgagcacggcagaactgcagatcagccaaatccatggccaggccacggtcggcgatgaactgctcaagatcggcgtcgctcatggtgcggaaaccttcgatgacctccactttgcccggtaccggcacctgcgtcttcaacgtggtcttggtatccagcgaagcttcgcgagcctcgaccgggttgatcacataatgcttgatggcggcgatgtcggcgtcgcccagctcgccttcaagtgcatacaccttggcggaacgaacagtcgggcgctcgccctgggagatcagctgaatgcattcgctggcggaatccgcacgctggtcgaactgaccgggcagatactccacagcaaacacattatcagaaccgaaatcaggcaaatcggcggaaacattatcgacctgcggctcactgaacacggtaggggtggcctgtgcgaacagttcctcgctaatgccttccacatcataacgattgacgagacgcacattcttcagcgatgcgatgccaagaatggtcttcagctcgttggcgagctgcttggcctcgacatcaaaaccctgcttcttttccacgtacacgcgaaaaaccatggttgactccttgaaagaggggcttggtgagattgataaaaataagattttcaaaaacgatgaagcccgcatccgagtttgtactgcagatgcgggctatcgcaagtattattcggctacttcaatgccttcggacttggcgagttcagccaagcggctttcgacctcttcgtaagccggaatgatgtcgcccagatcgcggcggaacagatccttgtcgagatgctcaactttgccggagccgtcacgctgatcccacagacggcaggaatcaggcgtaatctcatcggccagcagcagcgtgccgtcggaagtgcgacccatttcgattttgaaatcaacaagcttgatgccgatcttggcgaagatctcgatcagggcctcattgatacggcgggcgagaggtgcgatctcagccagatcctcacgggtgcagacgcccaacgcaaccagatcgtcgtcgttcacgaacggatcgtgcagatcgtcgttcttcaggaagtactccagcaccggctccttgagctcgatgccctcttccacgcccaagcgagagcagaagtggccggcggcggtgttacgcagcacgatctcgagtgggaacatggtgaccttcttgaccagctgggaggtttcgcctacgcgggccaccagatggctgtcgataccgcgcttcttgagcagatcgaagatcagcgtggtgatgaggttgttcagcctgcccttgccggcgaagtcttccttcttctcgccgtcacctgcggtagcggagttcttgtattcgacccagagcacctccggatcgtcagttgcgtacagttgcttggctttgccctcgtagagcttttccaacttctccattactcgcctttcctggtgtttgggaggtagatagtttggtgaacttgacggttaacaagataccaacgggaggctacaatcgaatggtttttgggcgcgttccggcagtcttccgtcagtatccggcaatagtgcgtcaggcgatgtcgatttcgagcgattcggccacattctcggctttagcacgcgcgtcggcctcatctgttccgatggccagcgcgaccgccatgcgacgatggccgtgcacttccggcttcgcgaaaatacgcagatcggtgcccggctgagacaaagcgtcggcgacgttacggaattcggcctcaccatcgccctgaatgacgatcgcatggcttgccgcgacggcaccgtccgggatcgacaaggcgacatgttcctgcgtaatcggcaaaccgagaatcgcacgcgcatgcaacgcgaattcgcttaaccgttgcgacgccatcgtgaccatgccagtgtcatgcggacgtggggagacttcattgaacagcacggaaccgtcggtcagcacgaacagctccacgccaaacacaccccaacccttctcgccggaagccttggccttcgccaccagaccttccactgcggtgcacgctatgcgttgcgcctgcgcaagcacatcctgtgtgaaggaggccggttgccaggattcgcgatagtcgccgctttcctgacgctgtccgatcggagcgcaggtcacgatgccggcgctggagctgacggtcagcaccgtcagctcgtaatcaagcggagccaacgcttctacaatcactcgggaaacgtctccctcgtcgtgcgcgcgacgaccttcctgtgcctcaacccaagccgcatcaatcgcatcggcggaacgcaccacggactggccgtgaccggaagaactcataatcggcttgaccacgcacgggtagccaaccgtttttgccccagcgcgaagctcttccagcgagcctgcgaagcggtacggcgtggtcggcaatcccaattcctcatgcgcaagtacgcgcaaacgttcacgatccatgcaaatggatgcgatttcggcacttggcaccacctgtgcgccacgctcggccgcggcagccaattcgctggtggcgatcgcttcgacttccggaacaatgatatccggctggatttcgtcaaacaatacgcgcaattgttcggcattggccatatcgagcgcacggtattcatgcgccacctgctgcgcgggggcaccctcataggaatcggccgcgcacacccatgcgccaagcctcatcagttcgagagtgacttccttgcccagctctccggagccaagaaacagaacacgagtcggatgcttaccaagcggagtgcccaaggcacgattctcttcagtcatgccttccattgtgccatcggcgtaggatggagtgcatgtctgagacggaacaggaagaaacacagcgccccctgaccatcgccatggtggtcgacacgtcgggaaaccgaggtaacggcacgtcgaattcggcgttgcagtgggcggaggaattgaagcggcaaggccatacggtcaggcttgtgggcattggtgcgcctgaatacccggcacgagtcaaccatgtgcctctggtcagttgggtggcgaaaaagcagcagatgcagttcgccgaaccaagcgacacgctgttcagaaccgcgttccgaggcgtggacgtggtgcacatctacacgccgttccgttttggccagcatgcgtgcaaagtcgccaaacagatgggaatcgcggttactgcgggctgtcatgtgcagccggagaacatcacgtattcggcaggtccgctgaaatatattccgggcatcgacaagttcatctactggctgttcaatttgtggctgtaccgcaaaatcgaccatgtgcatgtgccgaccgagcttggcgcaagtttgctgcgttctcacgggtacaaatcgaaactgcatgtgatttccaacggatatgaatcacgattcactgcgaaaacgcagcgcgatgcggggaagtctgctccggttccgttccacattgtcgcttccggacgattgacgaacgaaaagaatcatgtcgcattaattcatgcgatcgcccgttgcaggcatgcgcaagatattgaactgacgattgccggcaccggtcctttgaaaaagaaattgcagcgactcgccgcacgtttgctttccagaccggcatcgatcggatttcataagaacaccgaaatgcccgcgttgctgcgttccggcgatttgctggtgcatccttcgattgccgatctcgaatcggtgagcgtcattgaaggtatggccgccggtttggtgccggtcatcgcatcgtctccgttgagcgccgcaggccagttcgcgttacgtgacgaatcgctattccctgtcgacgatgtggaagcgttggcaaggcgcatcgattggtgggtcgatcaccccgatgaactgtcgaaatggggcgaaatctatgccgaacacactaaagagcattattcggtggctgcttccgtgcgtaaattcgtggctatggaacgcgaggcgatcgccgataatgccaataagcaaatcaatgcgtaacaatcagcataaatggaaccacatgcgtgataaatgatcgtaacgtaagcaaaaaggcgcgggatgtaattcctgcgcctttttgttgtttgtcgtaatgattatttttccgattgacagcgacgatgcgcgctacagcaatgcgatcagctgctccgcctgctcatcggtggtggcccagctggtgcagatgcgcatcaccgtgtgcgtgtcgtcggccttttccatgaagccgaggcgcacattgcgctgcaaacgctcggatgtcgcgttgtcgagcgtgatgaagatctgattggtcggcgcgtcgaaggtgagcgtatagccacgttccaccagcacttcgcgaatacggtcggccgcatcgttggcgtggcgggcgatcctgcaatacagatcgtcggtgaacagcgtgtcgaactgcacgcccagcagccatcccttggcgagcagcgcgccatgttgcttgacgagcgtcacgaagtttttcggcatattgccgtgcgtgaacaccacggcttcaccgaacatggctccgaccttggtgccgccgatatagaatacgtccgcgatacgcgcgatgtcttcaagcgtcacgtcgttgccggttgcggtcagcgcgtagccaagtcgtgcgccgtcgatgaacaacggcatgtcgtacttcgtgcagaccttgcggatcgcctcaagttcggcgagcgtgtagagcgtgccgtattcggtggcctgcgaaatgtagacgcatccggggaacaccatgtgcgtgtagttgccgtccgcgtagaacgtggcgcagtactcgtcgagttcggtcgcatcgattttgccgtcatggtgggggagcgtcagcaccttgtgtccggtgaattcgatggcgcccgcctcatgcacgttcacatggcctgtgcttgccgcgattacgccggcatactgcggtgtgatggagtcgatgatggtctggttggtctgcgtgccacctaccaggaagaaaatctgcgcgtcagggcaggcgcatgcttcgcggattttggctttcgcgctttcgcagatgctgtcgttgccgtaacccggatattggttttgtgcgatttcgctgatgcgttcgatgatttccggtgttgccgtgcaggaatagtcgttttcaaaagacagcatgatgcgctccttgtatctgacctatgctgatgacttgcgaccggctgtttgctgtattcaagccgtccggatagcaaaaaacctcggaatttcttccgaggtctctaccggggtggctaacgcggctcgaacgcgcgaccttctgaaccacaatcagatgctctaccaactgagctatagccaccatgttttcgcttcatacagaagcgcaacagatgaaaactatacacgattttccagctatgtctacatcggcgtgttgcgtgtgcctgtcgtcggcttgcgctgtggactgttcattatgtgaacggcatattacgcaaggccgaaactcatgcgtaccttgtagtcgctgcatgcgtaagggtgtgctgtaatgacggtgtgggccgtctcggagtgttttcggcgtatgcggatcatcggccgaaaagctgtgaaatgtgaaggaagagagattcatgcagaaggtcaaagcgtttggtgattggctcaccaagtggttcaccgcgatcgtgatcgtgtgggccgtgttcaactatttcgtgccgcaggcaagcttgtggggcaaatcctataccggttatttcctgggtatcgtgctgttcggcatgggtcttaccttgacccttgacgatttcaggcgcattctcacccagcctctgatggtcatcgtcggtaccgtggcccacttcgtcatcatgccgttggtggctgtgctgctgtgctggattttccgtcttgatggtgcgctcgccgtcggtgtgattctggtcggctgctgcccgtccggaacctcgtccaacgtgatgagctatctgagtcgtggcgatgtggcgctggacgtgtccatcggcattttgtccacgttgtgcgcgccgttcatgattccgctgttgatgcagtggctggcttcccagtatgtgtcggtcccggtggaatccctgttcctcaatgcggtcaaggtggtgctgttcccgatcgctcttggcgtgatctgccatgctattttcggcgagaagatcgagaagattacggtcgctctgccgatcgtgtcccaggtggccatcctgcttatcatcggcgtggtcgtcgcagccaacggtccgaagctgttcgtggcttcctcgctgcttgccatcccggtggtcattctgcacaacctgtgcggatacgcgttgggcttcggtttctccaaacttatgtacaaggtatatccgaagggcttccgttatgcacagcagaaagccatcaccttcgaggtcggcatgcaggattccgctttgggagcgactttggcgctgacgtcgttcgcttccaatccgttggccgcggtgccgtccacgttcttcagcgtttggcataacatttccggttccgtgctgtccagctggtggcgtgagcatgatgacaggcatcagatccatcctgattccgacaatggcgagaagggctcggctgcgaaggcccgcgaagacgctgccgaaacagctaacagctgacattcgtcagtagattccgtcgtcatattgcgcattccctgaatctttcaaaacgattcagggaatgttttgttttgagtggtgcaaacgtgtcattgtgatgttttgttgctttgcgctgatgtaggcaaaatgattgaaattattgggatttaagggtgtcttcacccgtgttttttgttcgttttggggtatactgtaactgaaggccggagttgtggatcagtcgagaattcgtcaggtcgcaacgaagcgccgatggccgtgaggttcatgcgcaacgcctttaagatataactgaacaatagcgattcgaaacagcggcaatggggtagtacggcgcaggcgccgggccgcaaatgcaaaacagacaacgagactgaagagtgcgcgtaaggtagcgcgtagcaaagaagtgggaacctccttcccgagtggatggccccggattcgaaaggatccggggccatcccttttgcgatttgcgacacggcatgttggaatgtcttgggaatccgtatactgataattcgtgtgtgccaacggcatgccttatgtgacaggcgtgcgggttgggatatcccggaactcgattgcatcacgcgcagcaatgcgacggtgagagagggatgggccatcgggccggtggactgtggctatcttcacgattcagatgcgtggagtgtgggtgcagtgcggcggtcacacaaaagcaagagaaaccactgaatcggagaattcaagttgcctactattgaacagctcgtccgtaagggacgtcaggcaaagccgaagaagtccaagactttggcactgaagggaagcccgctgcgccgcggcgtgtgcacccgtgtttacaccaccaccccgaagaagccgaactcggcactgcgtaaggtcgctcgtgtgcgcctgagctccggtgtggaagtcaccgcttacatcccgggcgaaggccacaacctgcaggagcactccattgtgctcgtgcgcggcggccgtgtcaaggatctgccgggtgttcgttaccacatcgttcgtggcgccctcgatacccagggtgtgaaggatcgcaagcagggtcgttccctgtacggagcaaagaaggcgaagtaagagatatgtcacgtaaaggaccttccaagaagcatcagctgctgccggatccgatttacggttccactgttgtggcacagctcatcaacaagattctgcttgacggcaagaagtcgatcgccgaagacatcgtctactccgctctcgatatggtcaaggaaaagactgatcaggagccggtggcagtgcttaagcgcgctcttgacaacatccgtccatccctcgaggttcgctcccgccgcgtcggtggcgctacctaccaggttccggtcgaagtgaagccggctcgtgcgaacactctgtccctgcgctggctgaccgacttctcccgcgcccgtcgtgagaagaccatggctgagcgtctggccaacgaaatcctcgatgcctccaatggccttggtgcttctgtcaagcgtcgcgaggatactcataagatggcagaggccaacaaggccttcgctcattaccgctggtaattagtcgagaacgagagttaaggaacactcatggcactagacgtgctcaatgatctcaaccagatccgtaacatcggcatcatggctcacatcgatgccggtaagaccactaccaccgaacgtatcctgtactacaccggcaagaactacaagatcggcgagacccatgacggtgcctcgacgatggacttcatggctcaggagcaggaacgcggcatcaccatccagtccgctgcaaccacttgcttctggaaccgtcagacccatgacgagaagcagaagttccagatcaacatcatcgataccccaggccacgtggacttcacggccgaggtggagcgctccctgcgcgtgctcgatggtgccgttgccgtgttcgacggcaaggaaggtgtggagccgcagtccgagaccgtgtggcgtcaggctgacaagtacggcgttccgcgtatctgcttcatcaacaagatggataagctcggcgctgacttctactactccgtcgacaccatcaaaaccaagctgggcgcgaccccgcttgtcgtgcagctgccgatcggcgctgagaacgacttcgctggcgttgtcgatctgattcgtatgaaggcttacgtctggaacgacgtttccggcgacatgggcgctcactacgacactaccgacatcccggccgacctgcaggacaaggccgagcagtatcgtgcagagttgctcgaccaggtcgcagaatccgacgaagagctgcttgagaagtatctcgagtccggcgaactgactgaggacgagatccgtagcggcatccgtaagctcaccattaaccgtgaagcctacccggtgctctgcggctccgccttcaaggacaagggtgttcagccgatgctggacgccgtcgtcgactacctgccgagcccggaggacgttccgtccatcgtcggtttcgatcctaaggacgaatccatcgagatcgatcgcaagccgaccaccgatgatccgttctctgccctggtcttcaagatctctacccacccgttctacggcaagctcgtgttcgtgcgcgtctactccggcgccgtcaccccgggcgacaccgtgcttgactccaccaagggcaagaaggaacgcgtcggcaagatcttccagatgcacgccgacaaggagaacccggtcgatgccgccgaagccggtaacatctacaccttcgtgggcctgaagaacatcaccaccggtgacaccctgtgcgacgaaaaggcacctatctccctcgaatccatgaccttcccggatccggtgatcgaggtggccgtggagccgaagaccaaggccgatcaggagaagatgagcatcgctctggcgaagctgtccgacgaagatccgaccttccaggtgaagaccgacgaagagtccggccagaccctgatctccggcatgggcgagctgcagctcgacatcatcgtcgaccgtatgcgtcgtgaattcaaggtggagtgcaacgtgggtaacccgcaggttgcataccgtgagacgatccgcaaggccgtcatgaaccaggaatacacgcacaagaagcagaccggtggttccggccagttcgcaaaggtcttgatgaacttcgagccgctcaacaccgaagagggcgagacctacgagttcgtcaacgaggtcaccggtggccacatcaccaaggaattcattccttccatcgatgctggtgtgcaggaagccatggaatccggcgtgctcgccggcttcccggtggttggcgtcaaggctaccgtcacggacggccaggtccacgacgtcgattcctccgaaatggccttcaagatcgcaggttccatgtgcttcaaggaagctgctccgaaggccaagccggtcatcctcgagccgatcatggccgtggaagtgcgtactccggaagagtacatgggcgacgtgatgggcgatatcaacgcccgtcgtggttccatccagtccatgaccgactccaccggtgtcaaggtcatcgacgccaaggttccgctgtccgaaatgttcggctacatcggcgaccttcgctccaagacccagggccgcgcaatgttcaccatgcagatggactcctacgctgaggttccgaagaacgtctccgaggagatcatcaaggcccagcgcggcgagtgacacgcgctgccgcttaagtggaaactgtctccagtcagcgctagtattttgtagcgctgactgggttcgggctccaaagtggcacaaacccgtcaaacccagtaaaatgtagcgagtgccttgaagtgagttcaaggcttactacgagacgtccaggaggacaaaacacatggcaaaggaaaagtacgagcgtactaagccgcacgttaacattggtaccatcggccacgtcgatcacggtaagactaccctgaccgcagccatctccaaggtcctgcacgaagagtacccggacatcaacccggcttacgacttcaaccagatcgacgccgctccggaagagcagcagcgtggtatcaccatcaacatcgcccacatcgagtaccagaccgctgagcgtcactacgctcacgtcgactgcccgggccacgccgacttcgtgaagaacatgatcactggcgctgcccagatggatggcgctatcctcgttgtggccgccaccgacggcccgatggctcagacccgcgagcacgtgctgctcgctcgtcaggtgggcgtgccgcgtatcctcgtcgctctgaacaagtgcgatatggtcgacgacgaagagctcatcgagctcgttgaggaagaggtccgtgacctcctcgacgaaaacggcttcgatcgcgattgcccggtcatccacacctccgcttacggcgcgctgcacgacgacgctccggatcacgagaagtgggttgagtccgtcaaggaactcatgaaggctgtcgacgagtacatcccgaccccgactcacgatctggacaagccgttcctgatgccgatcgaagatgtcttcaccatctccggccgtggcaccgtggttaccggccgtgtcgagcgtggtaagctcccggtcaactccaacgtcgagatcgttggtatccgtccgacccagaccaccaccgtcacctccatcgagaccttccacaagcagatggatgagtgcgaggctggcgacaacaccggtctgctgctccgcggcatcaaccgtgaccaggtcgagcgtggccaggttctggctgctccgggctccgtgaccccgcacaccaagttcgagggcgaagtctacgtgctgaccaaggacgaaggcggccgtcactcgccgttcttctccaactaccgtccgcagttctacttccgtaccaccgacgtcaccggcgttatcaccctgccggaaggcgttgagatggtgcagccgggcgatcacgctaccttcggcgttgagctgatccagccgatcgctatggaggagggcctgaccttcgcagtgcgcgaaggcggccacaccgtcggctcgggccgtgtcaccaagatcatcgagtagtttctgcttgatatcagggcacgcttgaactagcgttttttaggaaaacctcccgaggcatgttcgccgagggaggttttcctatatatggaaggcttaccgacaaagtatgcacaccgtggcataatgagcaaggctcttttaagctttccctgttagacgaagaaataggtgagttaatttggcacagactaccaatgacatcaagaacggttccgtcctgaacctcgatggccagctgtgggccgtcatcaagttccagcacgtcaagccgggcaagggccccgctttcgtgcgcaccaccatcaagaacgtcctctcgggcaagatcgttgacaagaccttcaatgccggcatgaagatggaattcgaaaccgtcgataaccgcaacctccagtactcctacgaggacggcgacaacttcgtgttcatggatatgaccacctacgatcagatctacattccaaagactctcgtcggcgatcaggccaagttcctgctggaaggaaccgactgcgtcgtgtccttccacgacggcaccccgctgtccgtcgaactgccggcttccgtgatcctgaccgttacccataccgaaccgggtctgcagggcaaccgttccaacgccggtaccaagccggccaccgttgagaccggtgccgagattcaggttccgctgttcatcggcgaaggtgagaaggtcaaggtgaacaccaccgacggctcctacctcggccgcgagaactgagagtaaggacgaaagaagtttcatggcacgttccaccgctcgtaagagggctctgaatacgttgtatgaagcggatgagaagggacaggacatcctgtcccttcttgctgagcgcattgagcagcccggcgcccagactccgctgcctgaatacgccatcgaaatcgttcgtggcgttgcggaacatatcgcagccatcgattccacgcttgacgagcattccaccggttggaaggtcaagcgtatgggcgttgtcgatcgcaatattctgcgtatcgccgcatgggagatcatgttcaatgatgatgttcccaatatggtggccatcgacgaggcgcttggccttgccaagacgttgtgtgatgacgaatcaccggcattcatccacggtctgctcagcgcggtaagcgctgatgcggatgccgctcaagtggatgagcaaccgaccgaaccttcagctgaataaagctgaaagttaagcgattcggccgggtcgcgagtcctaaccggccgctatccttggtacgaataccttgactataagggggttttggtgaaccagtatgattccgaagccgtgatgtttgaccctcaagatgccgttctcgttctcgaagacgggcaggtgtatgtgggtgaaccttacggcgcgatcggcacgaccagcggggagatcgttttcgcaaccggtatgaccggatatcaggaaacgcttacggaccccagctacgatcgtcagatcgtggtgcagacgttcccacacattggggacacgggaatcaatggggaggatccagaatcctcacgaatctgggttgccggttatgttgtgcgcgatcccagcccgaatgtgagcaattggcgtgccaccggcagcctcgatgacgatttggaatccaatcacatcgttggcatcagccgaatcgacactcgcaagcttgtacgccacctgcgttccacaggcgtgatgcgtgcaggtattttctccggtgatgctctgcttgacgccaatggcaagctgcgtaccatcgaatccatgcttgacgaggtcaagtccactccgcagatgaaggggatgagcctctacgacgaagtcagcaccaaagaagcctataccatcgagccgtgtggtgaattcgaaggcaaggaaccgctgttcaccgtcgccgcggtcgatctcggcatcaaggccatgactccgcatcgtatggccgagcgtggctgccgtgtacatgtggtgccatccaccatcacgttcgatgagcttgaagccctcaatcctgacggtgtcttcttctccaacggtccgggagatccggaacaggccgatcctgaagtgaacctgcttcgccaggtacttgacgcaggtcatccgttcttcggcatctgcttcggcaaccagctgctcggccgtgcgctcggcttcggcacatataagctgaagttcggtcaccgcggcatcaatcagccggtcaaagacatgaccaccggcaaaatcgaaatcaccgcgcacaaccacggctttgccgttgacgcgccgatcggcgaaaccgttgacgcgccgtttgaaaacggcaagtacggcaaggtgttcgtcagccacatcgatctgaatgacaacgtggttgaaggcctgcagtgcgttgatattccggcattctccgtgcaataccatccggaggccgcagccggcccgcacgatgccgcatacctgttcgatcgtttcgtggatctcatgcgttccgccaaggagggaacccacaatgcctaagcgcacagacatcaagtccgtgatggtcatcggctccggtccgattgtgatcggccaggccgcagaattcgattactcgggcactcaggcctgccgcgtgttgcgtgaggaaggcatccgagtcattctcgtcaactccaacccggccaccatcatgaccgatccggaaatggcggatgccacctacatcgagccgatttccacgccgattctcgagcagatcatcgccaaggaacgtcctgacgcgctgctgccgaccttgggtggccagaccgcgctgaacgcggccatggcgttgggtgaggccggtgtgctcaagaagtacaacgtcgagctgatcggtgcttctctggaagccatcgatcgcggcgaggatcgtgagctcttcaaaaaggtcgttgaggaagctggtgcagaatccgcacgttccgacatcgcacactccattgaagaagtcgacaagatcgccgaaaagttcggttatccgctggtcgtgcgcccaagcttcaccatgggtggccttggttccggcatcgcgcacgacgaagaggaactgcaccgcatcgcaggcgcaggcatccattattccccaaccgacgaggtgctgatcgaagaaggcatcgaaggctggaaggaatacgaactcgagctgatgcgcgacaagaaagacaatgtcgtggtcgtctgcccgattgagaacgtggatcctgtcggcgtgcacaccggcgattccattaccgtggcgcctgtgttcactctgaccgatcgcgagtatcagaagcttcgtgacatcggcatcgccatcattcgtggcgtgggcgtcgataccggcggctgcaacatccagttcgccatcaacccgaacaccggacgcatcatcgtcatcgaaatgaacccgcgtgtgtcccgttcctccgctctggcatccaaggcgaccggcttcccgattgcgaagatcgccaccaagctggctcttggctacacgctcgacgaaatccagaacgatatcacgcagtccactccggccagcttcgagccgaccatcgactacgtggtcaccaaggtcccgcgtttcgccttcgaaaagttcccgggtgccgatccgacgctgaccacttccatgaagtccgtgggcgaggccatggctctggcaggcaacttccaggaatccctcggcaaggccatgcgttccatcgacaagcgccacatgggcttcaactgggacggcgacaagcctgacgtacaggaagtcgagcagctgttggaagccatcaaggtgccgaccgagcatcgttatctgcagatccagcgcgccctgtggggaggcgccaccgaacagcagatcttcgatgccaccaagatcgacccgtggttcatccgccagtttgtactcatcaacgagaccgcccttgaaatcaaggaagcgagcaagctgagccgcaagctgctaaagaaggcgaagctggcaggtctttccgaccttcagatcgcacacctgcgccacttgggcgacgaaggcgaaaacacgatccgcgaactgcgttggtcgtatgatcttcgtccggttttcaagacggtcgatacctgcgctgccgaattcgacgcggtcacgccgtactattactcctgctatgcggacgaaagtgaactgcgtccgcgtgagcgtgaagccgtgatcattctcggctccggtccgaaccgtatcggccagggcatcgagttcgactacacctgcgtacatgccgtgcaggagctgggcaaggactatgacaccatcatggtcaactgcaacccggaaaccgtgtccaccgattacgacatgtccgatcgtctgtacttcgagccgcttaccttcgaagacgtactcgaaatctacgaggccgaaaagaagatgggtccggtcaggggcgttatcgttcagctcggtggccagaccccgctgtctctggcggctcgtctgaaggctgccggtgttccgattctcggtaccacgcctgaatccatcgatctggctgaaaaccgtgagctcttcggcgaagtgctgaagaaggccgagatgaacgcgcctcgctatggcaccgctctgagccttgacgaagcccgtgaggcggctcataacatcggttatccggtgctggtgcgcccgagctacgtgcttggcggtcgcggtatggaaatcgtgtacgacgacgcccagctgtgcaagtatgtggatcgcgcattgaaggaagctcaggccgataccgtggtttctggccgtctgccttctccgttgctgatcgacaagttcctgcaggatgccgtggaaatcgacgtcgacgccttgttcgatggcgaagagctgtatatcggcggcattatggaacatgttgaggaagctggcgtgcattccggtgacgccgcatgcactctgccgccgagcaccctttccgatgaccagatccgccgtctgcgcgaaggcacctatgccatcgccaagggctgtggcgtgcaaggcctgatcaacgtgcagtatgccttcatggccaacaccctgtacgttatcgaggcgaacccgcgtgcctcccgtaccgtgccgttcgcatccaaggcgaccggtgtggcactggccaaggccgcggcccgcattatggccggcgaaaccatccagcagcagcgcgataacggcttgctgctgcctcatggagacggtggtgacattcgccgcggccagcaggttgccgtcaaggaatccgtgcttccgttcaagcgcttccgtacgccgctcggcaagaccgtagacgtgctgctcggaccggaaatgcgttccaccggcgaagtcatgggcttcgaccgtgacttcccgcatgcgttcgccaagagccagctggccgcctacgatggcggtctgccgaccagcggcaacgtgttcatctccgtgaacgataccgacaagcgtcagctgccgttgttcgctgcgcgactggtggagcttggattcaacatctgggccaccgaaggcaccgcatccgtgcttcgtcgttacggcatcgagtccaagatcgtcgacaagatcagcgtgcgtatggattccaatccggacgatccgatcaccacctaccatgcggagggcagcgtcggcaagaacgtcgttcagctgatcgaagagggtgccattgatctgattctcaacacgccgaattctcgtggctcccgttccgacggttacgccatccgttcagccgctattgccgcggatttgcctcagttcaccaccatgacggaattctccgccgtgttgatggccatcgaggccgtgcgtaataatgattatcagatcatgagcattcaggatcattcccagcagctattcgagttggaaagccgtgagtaatgatgagcagcctcagcagtgaagaaatgagtgcccagcgttcggacttcggtctgcgactgagcaattccatggcccaatatggtccgctatgcgtgggaatcgatccacacaggcagcttcttactgactggggctacaacgtagacgcattgggtgccgaactatactccatgcgtatgctgcaggcagccaatgggcgagcggcagctgtcaaattccagttctccatgttcgagcgctacggttcgaaaggtatcgcagcgctcgagcgggcactgtacgcagcccgtcaaatgggtatcatcaccatcgttgactgcctgcatggaggcttgccgactacggtgtccgcattcgccgatgtctatttcaagccgaggtctccgttgcttgccgacgccatcactttgctgccatattatggcgcacgctcgttgggcggtgtcattaacgatgccctgaacaacggtcgaggtgtattcattgcatcgctgacctcgaaccaagagggtgccagcctgcagaccgccattcgtcaggcaggcgagtacaggggcagaacagtggcgtacggcattgccagcacggctcagaagttcaataagggcaatgacggtatgggttccgtaggcttgatcatcggtgccaccatcggtcagtggatcaatgattccggtgtcgatccagccaagttcactggtcctattctgtctccgggctacggatggcagggtgctgaaacccgcgacctcaagacggtgttcaaaggcaccaagggcaatgtgctcgtcaccgtgtctcgcttcatcgccacgcatggtccggatatttccagtttggccgcggctacggaatccgtggcgctcgatattcgtcaagcgctcatcgaggcccagaacgaagtcgatgatgagattttggatgatgaagaagacgagtaaatcatcatcgatttgtcaacaataattccttcttgtaaatatcttcagcaactaatacagagtgaggaagcaatgaccgactcccagcatggccgtttgatcgtcctttgcggaccggcaggtgtaggcaaaggcactgttctcgggcgcgtgcgcgagcagcacccggaaatctggctgtcggtatccgcaaccacacgacagcctcgtccaggtgaagtggatggcgtgaactatttcttcatgcccgaacaggagtttctcgacaaggaagctgccggtgagttcttggaaaccgccgacgtgtttggtctcgcacattacggcactcccgtgaaacctgtcgtggaacatcttgagcgaaatattccagtcattctggaaatcgatattcaaggtgctcgcagtgtcaagcagcgtgcgggggagttgggtatcgaggtaatgaccgtgttcatcgcgccgccgtcatttgaagaactggaacgacgcttgatcgggcgcggcactgaaactccggaacagcaggcgaaacgattggaaaccgcaaaaatcgagcttgccgcggaatcggaattcgacaaagtcatcgtcaataatgttgtggatgaggcagcagatgaactgtggaaccttatcgcaacggaattcgatttgtaatcataataattacaaggattgtaatatgcgctcgaacatatcgggcgcatatttttatataaaagaagccaagtatgaaataaaaatgaggattgcgcagcatattaactgcacaatcctcattatgttatttaatattcgctaggatcaggcgagaccggaaagcttgttgatcagctccggatcgcgcgtggcacccttgtctgcggaacgggcgaacgccgcgtaggccttcagcgcctgggagaccttgcggtcgcggtgcgccacatagccgtcgccggcttcgagttcggtgcggcgctgggccagctcttcgtcggaaagctcgacgttcaccgtacggttcgggatatcaatgttaatgatgtcgccgttcttgatcagggtaatcgggcccttgtttgccgcctcgggagcgatatggccgatggccagaccggaggagccgccggaatagcggccgtcggtcagcatggcgacctgcttgccgatacccttgcccttgacgaacgacgttgggtacagcatctcctgcatgccagggccgcccttcgggccctcgtaacggatgaccagcgccataccgggcttcagagtgtcgttgaggatgacctcgatggcctgttcctgggattcgacgaccagtgccggtccacggaaggtccaaatctccttcggcacaccggcggtcttcaccacgcagccgtcaggggcgaggttgccacgcagcacggccagaccgccttcggtgacggctggatgatcgatgtcgtgaatcgcgccgttcacacggtcgcggtcgagggagtcgaacagcgtggtatgcgtccacggatcaggggacacgatgtgacccggggccgccagatacatctgcttggcttcctcggtgcaggtatcacgcatgatgtcccagtcgttgagtttgtcctcaagcgtcttgtaatcgatggaatgcacgtcgcggtgcagcttgccggcacggtcgagctcgccgagaatgccagtgatgccaccggcgcgatgcacgtcggagatctcccattcgccggacggcgaagccttgcagatgcagggcacggtgtgggagatgcgctcgatgtcgtcaagcgtgaagtctacgtcggcggactgcgccatggcgaggatatgcagcactgtattggtggagccacccatggccacatccatggtcatggcgttctcgaacgcttccttggtggcgatggaacgcgggagcacagtctcgtcatcatcgtcgtaatactgcttggcgatcttgacgatctgctcggcggcgcgcttgaacaaatccttgcggtaggagtgcgaagccagaatggtgccattgcctggcagggccaggccgatggcctcggtcaagcagttcatcgaattcgcggtgaacatgccggcgcaggaaccacaggtcgggcagacggtcttctcataggcgagcagatcctcttcgttcagattgtcgtcggcggaggcatacatcacgtcgatcagatcggtgttcttcttcacggttccgtcgggaagtaccgtggtgccggcctccatcggaccgccggagacgaagacggtcgggatgttcagacgcagagcggccatcagcatgcccggcacgaccttgtcacagttcgggatgcagatcagggcgtcggcacagtgcgcgttcacctgatattccacggtgtcggcgatgatgtcacggctcggcagggagtacagcatgccggtgtgtcccatggcgatgccgtcgtcaacggccatcgtgttgaactcacgcggaatgccgccagcttccttgatggcctcggagatcagtcgaccaactttgttcaggtgcacgtggccgggcaggaactcatcgaaggaattggcaatggcgatgatcggcttgccgaaatccttaccgtccacgccagcggcacggtagagggcgcgtgcgcccgcgaatactcgtccattcatcagttttgcagatcgcatttccatgttctctattgtggtggttaagcgggacacggttttgtcaagagtcactatgtggaattcccagaagcgttatattcgcgagcattgccgaagatgcttgcgcttgccgaaaacatgagagaaagggcttgaatcaggtccagtggcggccctatacttaagactttggaaaagaagcttttggcttatctgatgattgggagataatcaatatggcattcggcactcagccaaccccgaccggtcttgcggaaccgccgatcgatgacttgatggagcatgcggactccaagtacgctcttgctattttcgcagccaagcgtgctcgccagatcaattcctatttcacccagctcaacgagggcctgctgcagaacgtcggtccgctggtggagtatcagaatcaggaaaagccgctatccatcgctttccgtgagatcaatgatggtctgcttgaagagaccctcggcgaagacgatctgaccgaaggcaactgatgtaacggttcttgcgataagaaccggattccaagttttcattcgccccgatacctgagcggtgcgctttgaatagtccatagtgaagctattgattgcgtatgcgaaggacggggcgtttttttcgtagcaatcagaagggcgaacgtgtggggcgttcgtgaaaggagcagccagatggctgaattgaagttgatttccgctgagtcagtgacggaggggcatccggacaaggtctgcgatcagatttccgacgcgattcttgacgatatgcttgctcaggatccgcagtcccacgtggccgtggagacatgcgccacggttggccagttcttcgtgttcggcgaagtgacgagtgaaggctactctgatattcagagcattgtgcgttctgtggtgcgcaatatcggctataccagttctcgcgttggtcttgatgcggattcatgcggcgtgaccgtttcgttgaccgagcagagctctgagattaaccagggtgtggctcgtttgagtggcgaagcggagtcgaaggcatctcgcgagcagcgttatgaggctcagggcgccggcgatcagggcgtgatgttcggctatgcgtgcgacgagaccgatgtgctgatgccattgccgatttatttggctcatcgcttggcttaccgtcttactgaggttcgtaagaatggcgaagtacctcatctgcgtcccgatggcaaaacccaggtgaccattgaatatgatgagcatgatgctcccgttcgtcttgacacggtgttggtgtccacgcagcatgatcctcaagtcgatcaggcgtggcttaaggagcagttgacggaacatgtgattcgtcctgtgctcgacgatgtgcttgccgatcgtgtggcgcatgatgaatatcgcgtgcttgtcaatccgaccggttcgtttgtgttgggcggtccggctgccgatgccggtctgaccggtcgcaagatcatcgtcgacacgtatggcggtgcggctcatcatggcggtggcgcgttctccggcaaggatccgagcaaggtggatcgttccgctgcctatgcggcgcgttgggtggccaagaacattgtggcggcaggtctggcccacaaggttgaggtgcaggtggcgtatgccatcggcgtggccgatccggtgtccatcaatgtggaaacgtacggcactgaaaatggtgtgactcgcgagcagatccagcaggctgtgcgtaaggtgttcgaccttcgaccggccgccattatcgacgagcttgatctgaagcgtccgatctattccaagaccgctgcttacggtcatttcggacgcaacgatgctgattttacctgggagaccaccaataaggtcgacgagctgaaagccgccatcgaaggctgagttacccttgaatcatgagtactgaggatgccgagcagctggcgcttgacgggctcgccccgcgcaagcggcgcaagcgtgcgcccgcggttaaaacgccggctgcggagcatcccatagcccaagtggtgctggatattcaggccatccatttggggcagaccttcgactattacgttgaggagaagtattccgaagccgcccagcccggagtaatggtgcgtgtccgcttcggcgggcaacgggtcaacggcatcatttggaaacggaccgataccagcgaaacccctgaatcgtcattgcggttcatcgaacgggtggtcatcgatcgtgtgcttgtgtcggaatccatgcgcaacgatgccacacttatcgcggacgcattcggcggaacgcgagccaatatcctgcgtttggcggtgcctccgcgcgtggctcgcgtcgaacaggaacaacgtatcggcaatcgaacgggtattgaaaaaaacggacgtatcgaatcgcttgccaagatcgagcgggaatcgtacgagcagctgcagcggcaatacggtaatatcgacctgcttcgtacggcattggaagggcaacgtttccaagcgttcgtgctcgacccattgccgggatcccatcattggaggcagtgcgtggcctggatggtggccgcggccttattgcagggcaaaccggcggtactggtgttgccgaccatgcgtgagattgaggacatggccgaaacgttgcagtcgatcggcttgcgctgtttcgcgccaacccaatcatccaatggtgcgtacggcggcgatttcgccattctgaacgcgcagatggcgcctgctgaacggtatcgtgcgtatctggccatcagtggagggcaggtgcggtgcgtgatcggcacacgggcggcgatgtatgcgccggtggatggcaatgcgttgttcctcattctcgatgacgtgtgctatcaggatgccgatggcatgatgccttacgccaacgcccgcggagtgttgcggttacgtgcaaaagcgcataatggcgtgttcgtcgcgatggccaatgcgcgcagtgtgcaaagccagtgggaaaccgatgcggcgcatgtcggtgccacccaggtcagcggtttcagtacgccgattcacgcattccctgccgtaaccaaggaagcgagtccttggattcgttggctgaaccgtgacgaattggcaagacttgcggattcgaccatcggagcgcgtgtgccgcacactgcggtgcgagtgctgtcgaaggcgttggaaagcggtccggtgctgttgagcattccgcaggatggcatcggtgaagcattgagctgcgcgaaatgccaccgtcaggctcgctgctcgtactgcacgggtccattggaacggttacgggatgggtcggtgcgttgtcgttggtgcggtgttgccactgtgcaatgggcttgcccggcatgccataacgaacgtatgcgcgtggttcgtgtgggtgccgccggaactgcgcaggagctgggccgactgtttcgtggcgtgcccattgtgctttcaacgccgagccagccacgcggcattgttcccgatatcgggtttgcgccgcagttggtcatcgccactcccggcgcagaaccccgtgtacgtgggaggaacccctcggaatgcgaataccgggccgtggccattctcgacgcatggaccagcttgtacgccttcggcattgacgcgggcgtagacacgttgacgtcgtggatgcgcgcggtttcgctgtgcgcgccgcgaatcaggggaggtcaggccctgttgatcggcgaaaccgatcccacgctcgctcaatcgttgatgctttggaattcaacgttgctggcgcaaaccgaattgcgggaacgtgaacaaaccgcattgccgcctgtgtttgccgccgcatgcgtatggggacgtcgtgacgcggtgaaggtcacgctggaacgtatcggcgcgttgggtgggggtgacctgtccgccatcgaaaccaccgaaggcatgctgccgtccgtattggggccggtacctattccgcagcctcggaccattgattcgcgcgaattggaaggcactgcggatcgtgtcaaggcggtggtgcgtgtgccgcaaagtcgccgaggtgagttggcgttgcgtttgcgttccgccagtgcccgccatgtggccgcgcgtgaaccgggagaactgcgttttcagcttgatccgaaggagcgaatctgacgcacgtcccctcgccgtgaaaaactagacaggttggcagttcggcatgaggccgcacagcagtgaatggaggatcatatgaagggttggcctggagagcctgatatggagtacgacgtgctcatggctgacggcgaagctgcggtgaatgcgggcaagccgatcaccgatgtgattttcgatttcggcaacgtgctcgtctactgggatccggtggccgtgatgacgccccgctatagcgacgagcttgttgaacagttccttgacaacgatatttccggcttctacgacatcaacgatgaactggactgcggcatgtcgaatgatgacggcgtcgccctgatgcgtgaacgttatggagacaaatgggccgacatgctgcagtactatctcgacaatttcgtcgactcgttgaccggcgtggtgccgggcgcccgcgtgctcatcaacgatttgaaagcggccggcgtgcatgtgtggggattgagcaactggcagaaggatctgttcccgatcgcgctcgacaatttcgatattctgcgcagcctcgacgatcgtgtggtttccggatatgtctccctgcgtaagccgaataaggatatttacgagttcgcgttgcaacagttcggcattgacgcttccggcgcggtgttcgtggacgataaggccatgaatatcgtaggtgcgaacaatgcgggcattcgtggcgttcgattcaaggattcacgtgcgttgcgtgcgctgctgattgatgcgggtgtgaagattcccgcggtgcatcaggcatagtgtgttgcgttccgctgccttacatgctgttgatacggccggaatgattcccacgatgataacgatgtgatgaggatttgataaggaggacttttcgtgctgaaagtgctgtttgccggtactccggatgttgcggtgccgtcgttgaaaatgctggctgaagataccgagcgtttcgaagtggtcgcagtgctcacccgaccggatgctcctaccgggcgtggacgcaaactggtaccgaatcccgtgaagcaggccgctcttgatcttggtttgccggtgattgaatccgatccgagcgaggaaacgttcatttccgaacttgctgcgaccggtgcccaggccgcggcagtggtggcatatggcaaaatcctgaagcaggatgtgctcgacgcgctgccgatgggatggtacaacctgcacttctcgctgcttccgcagtggcgtggcgcggctcccgtgcagcgttccatttgggcgggcgagaaggtgaccggagccacggtgttccgcatcgtgcgagccatggatgccggtccgattctggcgcagtccactgtggaaatcggagcgcatgaaacggcgggtgagctgctgaaccgtcttgccgaggatggttcccgtttgcttgccgcctcgctgcaggccatggccgacgatcagatcgcgcctgtggaacagcctgccggcgcatatgaggtggctcagaagatcacggttgaagacgcgcatattcgtttcgacattcctgtattcgcggtggatcgtcagattcgagcctgcacgcccaatccgggcgcatggtgcgaactgcacgccaatgccgaatcagaaccggccacgttgcatgtgttgcgtgcgcagggcgccgatatgagcaatcccaacacacccgtttcgctagaaccagggcggatcgtggccggaaaaaagaacgtgtgggtgggtacttcctcagatcctttggaattgctggaagtcaaagcccaaggcaaaaaagccatgcgtgccgccgattgggcgcgtggcgcgcatctcgacggagcctactgcaagtagtgtcgaataaacggatcataacgatattgccgtgtgaacatcatcatttcacacggcaatatcgttatcctgcaatatcggattttgctatatcgcgactcggatctatcgggattcgcatcatcgaagaatgcgaatcaacgaagaaaatcaagaatccgggtcaaatcacgttcgttcacacgatgcggagcatccgcctgaaccgcaggcttggcgcagaacgccacgccaagcccggcggcatgaatcatcggcagatcattggctccatcgccaaccgcaacagtctgacccatgctgatgcccatgcgcgaagcccaatcacgcagtgactgcaatttcacatctttcgtaacgatatcgccaagcacatggccggttaaacaaccatcagcggcttccaaacgattcgcaatccaaaaatcaagatgcgcgtcggcggcaagacggtccacgacttcatggaaaccgccggaaaccacgccgaccttccaaccatgcgcatgcaaagcgtcaatcaaatcaagcgccccctgtgtgaaatgcacgcgacgatacacatcatcgaacaccgaagtcggcagatccttaagcagcgcaacacgagcctgcaacgcctcgcgaaaatcaagttcgccattcatcgcacgtgcggtaatcgacgcgatctgctcgccaattccagcggcggcgcccagctcgtcgatgacttcctcatcgatcagcgtggaatccgcatccatcaccagcagtccaggctgggaaagggtgggagtgggcgcaatgttcggcgattcttgttcaagcatggttttgattgtcggaaatcatgaggacaatgggtattcttaagggttgagcatgttgaatgcgaatgcgccatgacatgacgaaatgacggaacggctcgaaacgcattcggtggaaagcgaggctgatgaaatggatcaacgtgatgagacgttggcgtcgttgggtgaggccaacgaccagttgatggccaagaatcatgcgttggccaaggcgttgagccgtgccacccaggagctcaccaaggccaaggcccagctgaaccagttggcgggaccgcccatgaccttcgccaccatggttcgcgtgcattcctctcgcacggacgaacagggggtacagcatgccagcgccgaggtgatttccggaagccgtcgcatgatcgtgccggttgcggcgaatgtgcaggcatccaggcttgaggctgggcgcacggtgctgctcaacgagaacatggtggtggtttcgcaagccggcaccgatgctgtgggcgcagtgcgcacggtgaagcaggtcattgatgatgggcgattgctggtcgcggatggcggtggaaacgttgcgttggtccgccgttcgggagcgctgtcgaaaacttcgatcaatgtgtccgaccgtgttacggtcgattcgtccatgagattcgcgcttgcgttggttcccgcgcaggatgatgccgacttggtgcttgaggaagtgccggatgtcacgttcgctgatatcggcggtttggatgagcagatcgaacgtattcgcgatgccgtgcaaatgccgttcctgcatcgcgaactgttcgaacgttatgatttgaagccgccgaaaggcgtgctgctgtatgggcctccaggcaatggaaagacgctgatcgccaaggctgtggccaatgcgctcgccgaaggcgctgccggcggtcgtggcgtgttcctgtcggtgaaggggccggaactgctcaacaagttcgtgggcgagtcggaacgcctgatccgcatgattttcaagcgcgcgcgtgagcgtgcggcggatggcaaaccggtgatcgtgttcattgacgagatggactcgctgctgcgcactcgtggatccggcgtgtcgtcggatgtggaaaccactattgtgccgcagtttttggctgaacttgatggcgtggaaacgcttggcaatgttatggtcatcggcgcttcgaaccgtatcgacatgattgatccggcggtgttgcgtcctggtcgtttggatgtgaagattcgtgtggagcgtccgaaagcggctcaggcggcgcagatcatccgccattatctgaccgacgatttgccgttggtgccaggggtggatgcgaaggctttgattggggtgctggtcagcgatatctattcgacggacgagcaccggtatctgtgcgacgtgtgcgatgagcatgggcaatggcatccgatctatctggcggatgtggtgtcgggtgcggtgctgaaaaacattgtggatcgtgccaaaacccgtgctgtgaaaatctccatcgaaagcggacagccggcggcgattggcgtcgatctgttggcgaaggccgtcgacgaggagtttcttgaaacccgcgatgcggtgttggacgccaatccggaacagtggagccgtatcagtggtttggaagcagggcgcatcacccgtatacgaccagtcgaataatgctggcaggcaacgcgaaatcagacgaagggaagtcgtatcaatgagcgttcgtcgaatcatgggcacggaaacggaatacgcggtttccgctctcggaatggagcattacaatccggtgaagctatcgttcgatgtggtcggtgccgcggcgaacgaacaaaccaagcatattcgctgggactatcggcaggaggatccggtcaacgacgcccgcggcaccaggctggaacgtgcatccgcgcatcctgatctgttgacggacgctccgcagctcaacatcaccaatgtgattgcagtcaatggcggccgtgtgtatgtggatcatgcgcatcctgaatattccgcgcccgaaaccgatgatcccttcgatgccgtgctctacgaccatgccggcgatctcatcatgcgtgagtgcgcgcgcaaagccagcgaacagaccggtatcgcaatcgcgctgcaccgtaataatgtcgacggcaaaggtgcaagctggggcacccacgaaaattatatgatgctgcgttcggtgccgtttgaccaagttgcgaaactcatgacggcacattttgtagcgagacagatttttaccggatcaggtcgcgtcggtatcggcgaacgaagcgaaaccgccggataccagctcagccagcgcgccgactattttcatatgaaagtcggtttgcagaccacattcgacaggccgatcatcaatactcgagacgaatcgcacagcacggatgcataccgtcgattgcatgtgattgtcggggacgccaatcgtatggatgtgccgcaggcgctgaaactcggcaccaccagcatgctgctgtggctgcttgagcatgccgacgaggcgggattgaacatagacgaagcgttggagccaatcatgctcgccgatccggtgagcgccatgcacgaggtgtctcatgatttgacattaggtgccatgttgccgctggaatatggcggcgagacctcggcatggcagattgaggtcaccctgcgtggcctggtgtatgctgccgctgccgtgatctatggaaccgacacgtccggtgaaccggcatggtctgaccgttcgacccgtaacatcatggcgatgtgggggcaggcgctcgccgatgtggctgccatcaggcatgccgatgatgatgcgcgtttgacgatgcgcgagcaagctggccgcattgaatggctattgaaatggcagttgttggagaagctgcgtcgtaaaattggctccggttgggatgatgcgcgtattgcggccgtcgatttaaagtgggctgcgattgatcccgctgactcgattttcgatcggttgcgtgcccaaacggagcggctgtttacggacgggcagttggtgcaggcttcggtggaagcgccttccgatacccgtgcttggttgcgtgccgaaatgattcgtcgttttccagaacaggttgtggccgcatcgtggtcgcatcttacggtgcgccatcgaacgattggtgataataccgtggagaatccgatggtctcattggatatgtcagaccctctgaaatatagcaaatctcaatgttcccgctattgtgagcgtgtccaagatgcggcgtcgattttggaaatgttacggtgaaatgcaatctgtgcgggtaacattgtcatcaattggtcgcgaagaacgaccattgacaacaggtaacatcatcccggtattttgaggagaggacgtgccgggactgtacagaggaaacgaaaaggcatatctatggaactgaggcaaatcgccctcgaagtcgcacgcatcctgcaggacgcaggcaagcatgcgttgaacgaccagatgaatccgcacgacatgagaaaactggaagtgtccgaagactgcttccacttcacttcagacaccgacaagcgcctgcagcagttcatcagcaaccgcctgacctatgtcaacgtgttcgacggcttctggcagcttcgccctgaacagtgctatcccggccagcgatactggtgtgtgggtggcatcgacggcgtgatcaatttcgcgcgaagcatgccggaatgggccatcaccgtgacattgttcgaattcaacgaccagtgctccgcacagccgatcctttcgattgtgcacgctccggcgctgggattgacgtatcttgcggtgcgtggatccggcgcgattcgtattcgcaagactccgttgggagacaaacgcgagaaaatcattccttccaccacgtcgtccctcgatgattcggtggtgagtttcggcatgtctccggtatcgtccgaatcgcagcgtgcgctcgatgtggtggcgaagattgccggacgtcctgccgatattaaacgtgtcggcccggcgtcccttgatttgtgcaaggtggccgacggtacgtacgatgcgtatttcgaaccgcacttgcatgagtgggacgtacctgccgtgtctgctggtgctgtggtgatttgggaggcgcaaggccatctgacccagtggaacggcgaaagcgttcactggcgccaggagaacgatgtgatggccaccaatggtctgatcaccaatgatctgagccagtatttggcatagtgttgcatgctgcgccacacctgatataaggtgtggcgcagcgtttttttgcaggtttgcaaccggaagttacagggaggaatgtcatgcctcaggaatttgaacaggctcaatccgcatccgcaggccaagaggtgggtgacattgtcgaatccgccggcgtacaagtcgacggaaccgctgatgcgttggatgccgtgcttgacgatatcgaatcggtgctcgagtccaatgctgaggaatatgtcggtagtttcgtgcaaaaaggcggcgagtgatgccgcagctgcgagacagcggcaatcattcctcgtcaccgcttgatgcgggaacgttgcgtgaggttcattctttcgctcgtattttcggcattgaaacggaatacggcgtcagtgtgaccggtgcggatgtgccatgcgacgccagccagacggcaatgatgatgttccaaccgatcgttgcctccgcgcgatcgaccaatacgtatattgaaaacgggtcgcgactgtatcttgatgtcggatcgcatcctgaatatgccacgtccgaggcctgcgatcccatggacgcccttgccgtggatgcggccggcgaactggtgatgcgcgatcttgcgttggacgcccagcaaaggcttcgagccacgcatgggccacgtgccacagtgcatgtgttcaaaaacaatgtggattccgcagggcattccttcggctgccatgaaaactatctggtacgtcgttttgtgccgttggacgtcatcgaacacgaattgctgccgttcctgattaccaggcagctgttcactggcgcaggcagggtgacggaatcaggtttccagatcacgcagcgtgccgattttctggatgaggctgtttcatcggcgaccacaagatcgcgtccaatggtcaacacgagggatgagccgcatgccgatcccgacgccttccgaaggctgcatgtgatcatcggcgattcaaaccgttctcaatgggccacgatgatgaagctggccaccacgcatctggtgctgtgcgttatcgaacaggctgggcgtgaaggacgtgagtcgggattctcgcggttcgcgttcgcggacgccggtgccgcaaaccgtgcggtcagtcgcgatatgagcggcgtgaatgcttcgtttgccatggccgatggatcgacgttgcagggtggtgccgtagccatgcaggaacgttatctacaggctgtggaacagttcgtggatgagcatccggaagtggcttcgtcgttgcctcgcgccgatgtgcacgatgtgcttcgccagtggcgcaatacgttggaagcgttccgttccggcaatgcaaatgctttgggagacagagtggactgggtgtgcaagtaccgcctgtttgaagcgttacgtgcccgttccagtgcggatcttccgctgagcaagctggaacagttggatctggactatcatgacgtggccaatggcgcgttgtatgcgtcgttgcttcgccgtggtgccttgcgttcgctgattgacggtcgtgaggcgcaaaaggcgcgtaccatgccgccggcggatactcgtgccgcattgcgcggcagattcgtcagtgcggccaaatcgcatggcgcgcagtattcctgcgattggaccagactatcgttgcatgcgccgcggaagatggatatggtgctgctggatccgttccaatgcagggagaatgaggatttccaagccatgattggcgctttggagtaagcgatggtggcaatgggaaacgtcgatgggagtggggtgtggccgacaagcttcggtcacaccccactcccatatcggtatgttctcctgaattgttttgcgattgcgctgcggtcgctttcgtttttgattggcttgaatcaggcttcgccgcgatatttcgccatcatctgcgattgcagctgttgcgcgcttggcggcgtccatgtgatggcatccgcgcccgcttcgatggtggcgaggatgcgatcttcggatccgcctcccgatgccaggatcggtatttccggatgatgcgcacgtatgcttgccacgacttgcgcggtgcgtgctccggctgcgacgttgatgatggccgcaccggcgagaatcttgcattcggtgatttcgtcgtcttccgtgactgttgcgataacgggaatgtcgaccatggacatggtggtttcgatggtttccgcgggtgccggcgcgttgatgacgacgcctgccgcaccttgcatttcagccaccatggccagctcggtcacacgcggaccggtggtggtgcctcctccgacgcctacgaaaagtggcatttgtgccacagtgagcaacgcctgtgtgatcaccggttctccagtgaacgggtagacggcgagaatggcgttggcattggtattacggatgatcgcagcgtcggtggtataggcgaacgatttgagcgtatggcctttgactgtgatgccgccgcaatgttgcgatatgactgcgggtactctcgcattgggggaggagaggcgaccttcgatgcgtgcggttccataacgggttcgtgacacatgtggtgttgtggaatgctgttccacggccacggcttcactgggagtgaacagggatcgtttgtcgatgcggattggtttgggggcatttgcttcgggaatggtctcctgctcgtcgctcattcctgcacctccgtatctgtgtgattcagcataaggaattcatggatggctttgcgtcgctcgacaacctcttcatcgagaatcctggtgtcggtattgtcgatgatgcgctgcagaagttcgctgagggtggaaagatcctcggtgctgaggcagtcaagcatgtgcgttgccgtgtcatggcttttgggaagttgttgcagcggtggcacgccacgacgtgccgcttcgacgttgcatactcgtgtggcggctcgtagcgcggtctgtgtgcgtgtggccttcagcttggtatgcagcagcagaatgttcaattcatgcagttgattgatgacttccttgcgttgatcggtcatgtctctctccatctatatggacacgatgtctaatatatatgcatagtgtagcgcagaatgacgcttgtacaagtgtcatgaacgacgaaagccccgaccgtcatggtcggggctttcgtcgtgtaagcaacatatcagtacatgacttacttggtgacagccttcttcagcagggagccggcggagatgcgaacgccgtaggttgccggaatctcgatggtctcgccggtgcgcgggttgcgtccggtgcgggcggcgcgcttgacgcgctcagcggagaacaggccggtcagcttcaggccttcgccggactgcatcgcctcgacgaacacgtcctggaaagcgttcacagctgcctcagcctgtgccttggtcaggttggacttctgagcgatcttcgagacgagatcagacttgttgtatgccataaagcatccttcttgggtcaggggacattctgattacgaacatccacgttctctatgatattagcgcactcttatgaggaaaatggcattttacaagggttttggtcgcttttttgaaaatcagggggaaaccaaagtgtacgggggtgtttgtcagatcaaattatgcatgtcaagccatttcatggccaacgcaccgaccggaatacgcaaccagtagaaggcgattcggtagacaagagtagcggaaaccgcgatggaggaggggatgcccacggcagtgaacgccaccgacagcacggcctccacggcacccagaccgccaggagtgggaaccgcggagcccaaagtgttggcaagcaggaaaatgaaggtggtttccgcaggattcgtgtggtatccaaacgccatcaatgctgcccagaatcccagtccggtcgcaaggttaagcaccagtgcgccggcaatgccaagggccagttcctttggccgtgcaagcacattgaccaggttgcgcgcgtatgctttgaccactggaaggtatttctcggtcaccaaatgacgcactggaggaatcgccatggcggccgacacaaccaacgcgacgatggcgatcaccatgatcagcgtattggtcggaatcatgccggataatgtgttgcggccggtgaataggccaatcgtcagcaacaacacgatggtagtgcctccctgtacggcccagaccgcgctcataaccgcggtcgcagccgtactgcgatagccgcttttacgaaggaactgcaggttgacgaatgctggaccgacgccggccggcatggacaccgcagtgaaaccggacgccatctgagagcaatacaagccgatcgtgttgcgtttatcggaatccatgaacacacccaaggtgatagcggaaccaagccacgccacaaagccaagcgcgacgcaaaccaacgccatggcgagattggcgtctctgacggccttgatcatttcggccggctgaatctgggtgaacaccacatatacggcgaccaccagcagcgcaattgcaatgaacgagcgaagactgaaccgggaaagcgtgactttttccatggaatccgcgacatcctgcggagcgagcgccgaaatacgcgtacgtaaatcggtaagcacatgcttgtcccagccaggcaatgcgcgcgtggaagcgggaatggcagccttctgtatgaagggtgccaaatcgatcagctgctcgtctccccaagtcctgcgagcgcaggcgatcgcacgatcattgccattgagtgtggcaagaagaaccagcaactgcactttgtcgagtgcgaagttcggagcggaactgccataatcgccattatgccaacctgcgattaccggatgcccgttttccatgcgggacagggtttccggagtgatgcgacgatgggtgaagccatgatggtgtgctgtggtgagatattccatgaacgcttccatatcatggtcggacatggtgttttggttgcattccaatggcatgcggttgcggtggaacaccagaatggaggattctccataatcggccacaccatacacgcgcggagtttccaaaccggcattggacaggccgagaatcatggcgtaatgatggtgcatggcgtcaaccgaggaacggtcgcgacgcatggaaacaccggtcaggcgaagccactgccatacttggttgagatatccggccgcatgcacttgattgtcgagtacggaaacggtgtattgcttgccgtcatagtcgacaacatcgtaaatacgggaattttcggccagatcgtcatccagcgtggccttcaatactcccgaatcgacgtagggggcgactcggcgggtgagcaatgatgtgtcaataccgatggaacgcaatgattgcgcgatttgtgatccccacgcgccattgttctgcgtgcctatggcgaaacggatcagcatgccgataacacggcctatggcgtaggatgcgatgacgccagccagtgaattccatgaaagcacgaccatcagcactgccactgcatacagcacgttccagccccatttggtgcatgagcggatacgccgagggccggagacggtgaggaacgatgccatggcggcataaaaatcggggagcagtccagtgcctacggatgtgctgttggattgcagtggaatgatcagcatggtattgccggagttgctgatcagcgcggatatgccccacaccgcaaagaatccgaatatgagggaaaccacggaaatcacgctttgcagccactctttggaagtaagcagctggatgagcacgctgacggtgatgcatacgatggcaagctgctgcaataatgccgagggaacatccatcagccagctgaccacgcggccggcggaatgaacgtcggattccacgccggacgcggtgccatgcaagtacacggagaacagaatcacgcctatgccgagcaccaaggcgaagaatgcgtgcgtcagatcggcgaaatcacgactgcgcttcggcggcacatcgtcgatatgcggggtgggcttattgactgcaggggagtgagacactgttgacttgctccatacgtgagattggcttcaggtgggtcatatcgccccactgcattcgataatacgccctgagggtggctacgaaatacgcggccaccctcagggcgtatggttttggtacttatttgacagcttcggttcagcggtcgaaatctaccagtttgctggcgacgccggtatatgttgccggagtcagcgccttcagacgagccgtggtagcgtcatcgaacgcctgctgatcgatgaactgctcgacggcttccttggagatctcatggccgcgcataagctccttgaccttctcgtacggcttgtccatgcccggcaggccggcaagttcgcaggcgcgcatggcggtctggatcggctcgccaagcacctcccagttggagtccagctcggcttcgatggcgatgtcgttcggatggatggagttcagaccgcccatcagattgttgagcgcgagcacggagtagcccaacgcggagccgatgttgcgttgcgtggtggaatcggtcagatcgcgctgccaacgggattcgaccagcgttgcggacagcgtgtcgagcagcgagcaggagatctccagattggcttccgcgttttcgaaacgaatcggattgaccttgtgcggcatggtggaggatccggtagcacccttgactggaacctgggcgaacacgccacgggagatgtacatccacacatccacgcacaggttgtgcagaatgcggttggtgtggctgatggtgccatacagttcggcctgccaatcatgcgattcgatctgagtggtgagcggattccacgtcagacccatgcggttggtgacgaattcgcgggagacggccacccaatcgacatccgggcatgcggccaaatgcgcgccgaacgtgccggtagcgccattgatcttgccgagatattcctgagccctgaccttgttcagctggcggttcagacggtacacgtacactgcgagttccttgccaagcgtggtcggtgtagcaggctggccgtgcgttaacgacagcatggccttgtcacggtattcctcagccttctgagccaaatggtcgacgatggcctgagcgcccggcagccacacattctcgatgccgtttttcacgcagcgggcgatggacaggttgttgatgtcttcggacgtgcatgcgaaatgtaccaaagtcttcaggccggtcagctgggtgtcgtggccaagcacgtcggcggccttgtcgagctggtcgtcgatgtagtattccacggccttcacatcatgatgggtctttgcctcatgggcggcgtgttgcgcgataccctcggcgccgaactcctcaggaatggcgcgcaggaacgcctgttcctcatcggtgagcggcttgacgccgggaacgatggtctggttgccgttgccctcgaaaccgttggccagcagaatcatccattcgacttcgacgcgcatgcgctcgcggttcaacgcaggttcgctcaaatattcgacaagcggagcggtctgctgatggtagcggccgtcaagaggggtcaatgcgattgcaggggagatatcagtaagcttcatagactacagcatacgttcagccgtaaacgaaagttgcgtatctgttcgctcggtggatggctttcatgatgtatgccgtgataccgttcttgttgcgccgtggctgcagtgttttttcatttgctcatgcgcccttcgaaatacatgacttcctgcagatcgccgtcgatgatctcatcgaaatgccgttcgtgggtgttcactgcggtggatcccatgtccgttgcgttctggtatgcggcttggtgatatttgagccaatgcgtgatttccttgttgtctggagcgtctgtgacgggagtgcctgcgaacgttgattcctggttgctgctggatttgcttgcggtgccgcgtacggtcagccaatggtcggaactggggttggcggcgccatcgagggccgccacgagctcgtcgtccatttccacgctggtcacccatgttttttccggaatcggatgattggcgacgggcgacccggcggtaaccacatgttcgatgtcataatcgtctttcaggtccgaggcgatggtggcggcaacgatgccaccttgcgaatgtccgatcaatgcgacgggctcattggatttgatgccggcctgtttcatggcttcctgcaccattcgcgcactgtccgcttccatgcgttgcttgctgtccgaactcatgagttcgacgttttgcggccacccaaatggagaatcgtgcttgccgtctgtgcctggaatggtgacgagccatgagttggttccgtcggatttacggtatttggagatggcgatggtgccgtagtcaagtccgctgtcgagatcggtcttgccgagacgttcctcggcaagacgtcgaagatcctccatggcctctccgacattatgcgattcacgcaccacttcggttttcggatggacttgggtgacggtgagattgttgccctggatcaggttgtaaccgcgcgacgatgccttggagatggtgccggctgcatggttgacctcatcggtacgcagcaggcctttggccttgccgtatccgctgaccgcggcgccggccgcgctcatgatgccttcctgcgcccaatccaacgagtccagcagatatatgggattggatttgccctcattggtggatcccatcacatatcccaaggcggacatggctgcgccggcgagtatcgattccttcgggaacgatgtgatcgccacttgcagcagttcgttcagtgttcttctgccagcgtcgtcgacttgggaatataacgattgcgcgcgaatgatcagcgccgatagctcagacaatcttgccgccatggctcccagcgcgcttgcatgggcgtcacattgtttgacgagctggtcgtatggcagttcgatgtgatccgtggcattgcaataggggcttgatccggacagcgaggcgatggccgacgacgcataggggtaggaggaaagctgaaggctcaatgcccggactgaatcatgggcgcggttcagagcgtcggcttgatggctgagggcttttgccgcgcgcatatatgcctcggtttcctccgtggagtatttgcatccgccgctgactttggcggtcacttcccagctcatgccgcacctactgcccataggagacgcaaggtggcgttgatcgaatcccgtagcgtcagggattgcttgcgtaactcatcaagccgcgcgcggtatgattcggcggcggttcctgtccaatcgggcaatgaactggatgcgagcgtggcgtcaagatcgtcaagatgtttcgatatggatgtgagcttggcattgacgagcagttgggtggttcgcacgccagcacggcaatggcatggcatgcctggcgttgaggccaaggtgttgatgaggttgaaccccagtccgggaataaacggataggtgattgatgcgttcatagctatattggagcacatcgggcggttgcccaagccggcgaacaaggcttgtggtcggaggacgggcgaaaagcacgatgtcggcgtgtcatcgttgaaaaatcaacaaaaacacgccgacatgcctgtggataactttctgaaataagcccccttaccagggttttgcgggcgaagacgtttggttggaatcctgcttggccgccgaaccggaatcatcggaatcggattgggcggactgtgcgttctgggccagaagctcctccaccttctgacgctgctcgtcagtcaaggttcctccgttgccttggcctccatcggtgacggattgcccaccttcgatgactgtgtcggcctcggtgccgtcggcatgctgcatctctccgattttcttgcgtatggattcggtcagttttgccgaaacttcggcattatgctcgatggatgtgcgtacgtttggcagcagcaacatgccggccgcgccagcttcacggaattgcgcgtcggtctgctgctgttgggtctgcaatttgtcgaaatcggcgtcttgctgttggctggctttgatattcgcattcagactgtccgtggcctggttgtagttgctgacggatgcgagattcactatgccaagcacgcccacaataaccgatatggctgcgatgacggcgatggcgatgcgaacgggcagcgatgcacgcgctgtaacggttgtgctcacagcagcctccttgattgcgtgatccatgccccggcctcgaacgtcagcagcagcgctacggcaatggcgaacggccagaccatggcgacggttcttgtgcgttgcttggatgtctgcgtgacacgccatttgctggatgcctctttggaatccccgccactcatggtcgtcgtggcattgagctggatggcggttccactgagctcgtcggcgatggcgttcatttcgtcggcattcatacgggacacgccaggctcgccggtttccggatcggtgacccattgcgtgtcgccttcctctacgccatcgccggtcacggggatattgtctccctgctcgctgcccacggcgacggtgaacgcatcggaaaggtagcgtcgcaatgatgagaacgttcggcgtgttttcgacgaggtctgctcgccatccgaaatcaggtacagcacgatcgcatcatcgggatgctgatcgtgaatcgacttgcatgtgagcaacaactggtcaatcggcacatccaaggtcgaaccggccgaaatggaagtcgattccggtgcaagcgtgtccgcccaattatcgatcgccttcgaatcaggcgtcaacggaacatccaacgttcccgaagcgccgaatcgcaatgccgcgaaactggaattcggatacatggcggcaatatccttcaccgcctgcttggcaacatccaagcggctgagctgttcgtcggaaccatactgcgcgtccgcgaccgccatggaaccggtcacatctaccgccaccaccacatcggtggtgttaatcgcacggctgttcgtggacgagacgatgcttggcgtcaatgccatgatggccaccagcgcacaaatcatcgatcgtcttgcgcaagcccagacggtttcatcgctttggctgcgtctacggatatgaagcacaatctgcgcgactgcgcaaaccagcatgatcacgcagatcgccgtgcctaaaggccatcccaaagcaggggagagcgtcagattggtcatcgcctcaacctccaagccaagagcagccaaatcactatcgccactgccaatgccagcgtccaccatcccggtgcgtccgatattgcggccttgctgcttgccgcgctgtcatggttgcgccgcgattcgatttgcttgaccagctcagccacggaagcgccgttcgattgcgtgagaaacacgccgccatgcgattcgatttcggattcgaactgtttggtcgtctgttccgattcgctttgctgcggtccggagaacagtccgtccacggtgatttccgcctgtttggtcaggtcaagagcctcctgaagcgtgtatgtcggatctccggaaacgacattgttggtggcgagcacaatggaagcggcacgttgacgggatgcggtctcggcgttggaactgccgtaggcgaaacctggcagcatggctgcgcaactcaccacgccgtcgccgatcagggaagtggcctctttacgattctgcgtaccttccagccagtcggaaatcgcttggtaatcgctgtctttcatcttgtcgatatcatcctgcgattcgacgcctttcagtatcgtgctggtcttgtcgagctgttcggacaccaattcgtaatcgtcggtcaacggaaacacggtacgtgacgtggaattgaaaatgctcaatccgatgcgctcgcccttgaaattgtccaccaatgtgcggtaggtatcgatcacttcgcggtcgtatggcaacgccgaaccagatacgtccaagcacagcacgatgtcgcggctgctcgcacgctcctctccctcatccacggtgctggggcgtgccaccagcgctatcgccagcaccagtgccatcaccaacagaacgacggcggcacgtgacatggtgcgccactgccgaaataatctcgatgcggtttcggtgttgagatcgtcatccaaactgaacgtccgcacggatcctgagtcgttatgcctgcgttttgcggacgccaataccatgatggcgatgacggccaatgacgcaatcaggcctgcaaggcctacccacggccagtgccatgacaattccattcatcgccacctttccacaagattggcaacccactctccagcctgttcaaccgtggcctctctggccgtgtgattgcgttcggcatccgcgaattccggcggatacaatgcctcgatggtctgcctgagcagggtgagcccatgctggttgccggtcgtgcgaggtgtcgcttcaatatcggtgagcgtctgattgcgcacatcgctgccggtggccgtggagacgaaatctctggcgatcgatgcgagcagggcgaacgcttcctctcttccgagatcgccgttggcatgacggtccaccacatcgttgatgcgttcatgccatatcgacgtgcccgtcgatgcgtcgtgacgtccgcgattggttttcttcgttggcttgagagttggtttcgacagccataccaccaagacgacaagtgccacggcaaggatgaggcataccgcgacaacgatgcccagccccgtttcgatatgaatcgggtccagtgtgtcgaaatcgttgcgagacaaggcgatgtgattcatgctttgcctcccaaggtgagtgaggacggtgctttgagctgattgcgtgtggagcgagatagggatgcggataccatccgtacgaattcccggaacatacgttcgcttgaatcggcacggatcactgtggaaccgcaacgattcagctcatgtctgatggacgcggacagatattcgcgatgcgtgcgaacctcctgcgccgttttgccggtgcgcaggaatgccggaatgcggcggtcgctgcccgcgtcgaatacgtcgcgcgcatggctattgtcgaacggattaatggttgcgacatcgatgagcgccatcggatgggtccttgcgatcctgcgaatggactccacgtgacgttccttaagtgcgtgctcatcggtggcgatcaccaccaacgcatccctgtcgcgaatgcgacgggcgtactccagcaaagcgtcgatattgcgaggtttgttccaatcacgctgcagcgcattgtccaacgtctgttcgaattgcgtaagtccgccattgaatggcacacgggtgatcgagcctgaatcgccgaatactatggacacttcgtcaccacgacgcaggctgagcgccgcgaacatgcatagggcgttggctgcgacctgatgaacctgttcgccggaaacgcaggtaccggtcatttcctgtccgacatcgagcaaaagccaggcgcgtgaagtggatgggcgttcgcgctgcaccaccatggggcggcccacacgggcgctggtcttccaatcaatccgttttgcctcgtctccaggctcatagatgcggatatccatgacatcgtcggcgccgaaacgcttgtctgatgcgtgcgcaccctcaagaataccgagcgccttgcgaacagtcggcaggctcaacgtggttccgagggcttcgatcttactgcggatcggatcttcggaacgaattgcgtcgatcatggaacgggaaccgcctgaacgatcgagtccacgacctgatcgctggtgacgccgtcggcaagggcctcgaacgtgagcaggatgcggtggcgaagcacttcatgtgtgaaggctttgacgtcttccggaatcacatagtcgcggccttgcatcaacgcgttggcctgtccgatgcgagtcagcgcgatggacgcgcgtggcgaggctccgagacgcactagtgtggacaatccctgcaccggcttggtgccggctcctcgggatgtggcagtgatatcgaccgcgtatttcatgattgcgtcggacacatgcacgcgacgggccgcggcgcgcaggaattcgacatcgctgatggacacgacgtcaccggtgagcgttcgtgaatcaaaagtgtcggagccgcggtgggtgagcatggtgagcatgcgctgttcctcctgcgcggtcggatacgtcatgacggctttcatcatgaaacggtccatttgcgcctcaggaaggttgaacgtgccttcctcctcgattggattctgtgtagcgatgaccatgaacggtttcggcagtgcgatgcactggccgccgatggtggtggctccttcggccatggcttcaagcatggccgattgggtttttgcgtttgaacggttgatttcgtcaagcagcacgaagttggcgtggatcgggccgatctgcgtggagaacttctgcgtcgcgaaatcgaagacctgggtgcccaccagatcggatggcatcagatcaggcgtgcattgcactcgcttgaacgatccggacacggaagtcgccagcgtctgcgcggccgtggtcttggccagacccggtacggattcgatgagaatatgtccgcctgccaccagcgtggtgatcagcgattcacgcaggttgtcctgtccaactagggtctgcgcgaagcgtgcgcggatgcacgtgccgagctgtttcgcccggttgatgtcctctgggggcaacgtgctcggtttggtgacggccggcattggaacgggggttggtgtcggtaccggattcttcggagggaataaagccatagttgctactgtaacgggtcaagctgacgggagggaccagtccacaggcttctcgcctgcggcgatgagcgcttggttggcgcgggagaacggttttgaaccgaagaatccgtatcgcgcggacataggactcggatgaggtgaggcgataatatatgcgttggtgagcagcggtcccagcgtctgcgccttgcgcccccacaggatggcgaccaagggtttgatgctgccatcgggattgcggcggttgttaagcgctttgatcgccgcgtcggtaacgatctcccaccccttgtcctgatggctgccgggcttgcccgcttcgacggtcaggcatctgttgagcagcataacgccttgattcgtccaaggcgtcagatcgccgttcgtgggcatgggtacgccgaggtcatccgtcagctccttgtatatattggtcagactacgaggaatgggctggacatcgggcgccacgcagaagctcagtcccaccggatgaccgggggttgggtaggggtcttggcccacgataagcaccttgatgctgtcgaatgggatggtgaaggcgcgcagaatgttcgcgctggcgggaagataccggcgtccggctgcgatttcgcctcgaaggaaatcgcccatgcggtgcacctgtggctcgacctcggcgagggcattcgcccatccgggctccacgagatctttcaacggcttgatgttcgattgtgtcatgcaccttactgtacgacgtgttgcggtcctgatgacaggggtggtttggttttcacgggatggtttcacgaacgttcggaataggggtgggaatgcggctcgattgtgttctgactgaggtggtcggtacacttggcagataagtgtgtgagaaacgaggtttgcaatatggctaagcaggacaaggagacctacgattcctacgagaaggatgtgtacgacaatcctccggcgggacctatgggtgttcaccgtggcgcgcgttccgcggcgtcccgggccatgccgtacgtcattgtcatcattgtggcgctgcttgctggtttgctgttctggagcatttattcaggtgagatcaacaatctgaagatgccgtggtcgtcgcaggagagttcgactacttcaagtgccgaaaagagcaagagcggcgagagcaagtccaagtcccaatccgactccgcttccggcaataagacggacgcatccaatgccgattcgccgaccgactcgcagcaaaatgatcagaacgccgaccagaatgccggccagaatgccgagcagacggataacgccactgcgcagcaggctgtgaacacgggtactgaggttcgcgtcgtgaacgcgacgaatatcaccggttatgcgcaaagcaaggccgacgtgctgacccaagccgggtataccagtgtttctgccagcaatccgacgggaaacgttccttcgcagaccgtggtctggtatcagaacgagaccgataaggcgaccgccgaaaacgtcgcacagacgctgggaatttcgaatgtgcggcaaagcgatggactcgtcacgccaatcgttgtggtgttgcttgactgaaaaacgccgtgagcgaaacaaaaaagccttgttcttttccccaagaacaaggcttttttgttttccttggaattccaacgttgatggcttatttagacgaacaattcttcttgcttacagcgcaactggcgacatggagtttggcactctcggcctgagagtgctaatctgccaattagcactcgaggagcgagagtgataactggcagctgacggctggtgcgttcttcgcttcgaaggtgggaataataccgtgtagccatatgtggaggaacaatggcaaagatcattgcatacgacgacgaagctcgtcagggaatgctcgcgggcctcgacaagctcgctgataccgtcaaggtcaccctcggtccgaagggccgcaacgtggtcctcgacaagacctacggcgctccgaccatcaccaacgatggtgtctccatcgccaaggaaatcgacctggacgacccgtacgagcgcatcggcgccgaactggtcaaggaagtcgccaagaagaccgatgacgtcgctggcgacggcaccaccaccgcaaccgtgctcgcccagtccctggtgcacgaaggcctgaagaacgtcaccgccggctccaacccgatcgctttgcgtcgtggtatcgagaaggcttccgaagccatcgtcaaggagcttatcgcagctgccaaggacgttgagaccaaggatcagatcgctgctaccgcaacgatttccgccgccgatccggaagtcggcgagaagatcgccgaagctcttgacaaggttggccaggacggcgtcgtgaccgttgaggacaacaaccgcttcggcctggatctggacttcaccgaaggcatgcgtttcgacaagggctatatcgctccgtacttcgtgaccaacgccgaagatcagaccgcagtgctcgaagagccgtacatcctgctgacctccggcaaggtgagctctcagcaggacgtcgtgcacatcgccgagctggtcatgaagaccggcaagccgctgctgatcatcgctgaagacgttgatggcgaggctctgccgaccttgattctgaacaacatccgcggcaccttcaagtcctgcgccgtcaaggctccgggcttcggcgatcgccgtaaggccatgctgcaggatatggccatcctgaccggcgcccaggttgtgtccgacgaactcggcctcaagctcgactccgtcgacatgtccgtgctcggcaccgccaagaaggtcatcgtctccaaggacgagaccaccatcgtggccggcggcggctccaaggaagacgtggctgcccgcgtggctcagatccgtgccgaaatcgccaacaccgattcagactacgatcgtgagaagctgcaggagcgtctggccaagctggctggcggcgttgccgtcatcaaggttggcgctgccaccgaagtcgaggccaaggaacgcaagcaccgcatcgaagatgccgtgcgcaacgccaaggccgccatcgaagaaggcctgctgccgggcggcggtgtcgctctggtccaggctgcagccaaggccgagagcgatgtcaagctcgaaggcgacgaggcaaccggtgccgcgatcgtgttccgcgccatcgaagccccgatcaagcagatcgccgaaaacgctggactgtccggcgacgtggtgatcgacaaggttcgttccctgcctgacggccagggcctgaacgcagccaccaatgagtatgaggacctgctggccgccggcgtcaccgacccggtcaaggtcacccgttccgcactgcagaacgcagcttccatcgctggtctgttcctgaccaccgaggctgttgtggccaacaagccggaaccgccggcagccgctccggccgctggcgctgacatgggctactgatccaacggtttggcaaagcctgacggcataagcaaaaagctataagtggagtccgtttcccatagtggacgcgggctccactttttgtttgcgccagctattgctttgattgcgtcggaagtacctgccgctactgcgcaaacagacgcgatgcctgcatttcggtttccgcatacagtgcggatgcctgcgtcagcgcatgctgaatcgattcgagcgactgctccatctgctgttgggcggcacgccattgttccgccaccgcattgaactgtgtggccgctccgcctctccagacgctctgcagattgttgagattggcgtacatgccctgcaccgactgacgtatcgcttggatggaggcgtttaccgccgcgctcgaggattgaatctgctcgctgtccacctgaaactgtgccatgatgatcctttcgttgccaggtacttttgtgtgctcggttggtaccgttcgctcgcacttgacgtatctgaacggtaatgtggactgtatggcaacagtgaacgcgatgaatgaaaaaaccagggttgtggtcggaggatgtgcgaaaatgtgcccaatcggtgtgtcgcgacaacggcaaaacttcagaaatcgttggaatgtagcggcttgcatgcttctttctatgctgttgtgttgtgcgatgatgttgtggataactcccgtcggcagcgcggaagacaatacgggcaccggaatcacggccacggaaaatatcaccgacactgagaatctgctcggatcaaacgtcgccgagatcacggatgccatcagcgcgacaaagcaggaaacgggcgtcaccgtgcatttgctgtacctggcaagtttcaacaccgaagaaaaacctgcaaaatgggcgagcgcgctgttggaatcgcttgatccgaaaccgaatacggttttgctggcggtcgcttcgaacgatggcaatctcgtggttgccgtttcgtcgaattccgacgaatggttgaagaagaagtcgacggtcgatgcgctttccgatgctgcgcagaaacctttgatggaaagcactccggattggtcgaaatccgcaaccgatatgatggatcagattgcggtgcagaagaagacctcgacgtcgtcgcagaccgtgctgttgggtgttggcggcatgatagccgtgctggtgctgctgattgtgattatggtggtgttccatattctgcgcaagcgtggcatcatcaagcgcaaggtgcgcaagcatgcgggaaggcatgccgcgattactgtgcgttccgagccggtgaaggcgtggagtgtcgatggtgagctgtccgttgaagcgcatgatggagggcagacgtcaaaggaagactcagaatccgttcaggaaacatccagtgaacagagtgatgcttaaagcatgagcaagcctattgaagcatccattgtcgttgttgacgacgaaccgtccatccgtgagctgttggtggcatccttgcattttgcgggttttgaagtgaataccgcggcttcgggatctgaagccatcgaagtcatcgagaaaatacagcctgatttgattgtgcttgatgtgatgcttccggatatcgacggtttcacggtgacccgtcgtatccgtcaggaaggcatcactacgccggtgctgtatttgacggctcgcgatgatactcaagacaaggtcatgggtttgaccgtggggggtgacgactatgtgaccaagccgttcagtcttgaggaggtcgttgcgcgaatccgtgccattctgcgccgtacccaggagcaggttgaggatgatccgattatccgtgtcgcggatctggagatcaatgaggattcgcatgatgtgtcccgtgccggacagccgatcgatttgagccccaccgaatacaagttgctgcgttatttgatggataacgaggggcgtgtgctctcgaaggcgcagattttggatcatgtgtggcagtacgattggggcggggacgccgcgattgttgaatcgtacatttcatatctgcgcaagaaggtcgacggacttacggtggaggatgagaacggcgagaagcacaaggtggctccgcttatcgaaacgaagcgtggcatcggctacatgattcgtgcgccgaagaactaaacggtcccgcgatgagtcaggatacccgtcagccgtcggctgacccgcagaacacgcagaagaacggcggccagccgcgtccgcaacgtgtgccttggcatcggcggatcggcaggaaggtgcaggccattccgttaagcaccaagctggtcacttgcatcattgtgttgttgaccattggcactatcggcatttccttttccattcgcacgcttgtgggcaattatctgctacagaaaaccgacacgcagttggtgaatcaggcgcagatgattttcaatagcatggattcgctggacagcaccacgagcgaggatggacggagcttggtgaacacgtattatgtcgaggtgcgggacagcgaatacaagcgtaccggcgctgggtcggtgcctatgctccgtgagggcgtggtgtccgagccgagtctgccttccgacggcagtatcgacggggtcacgctcggagagccgttcaccacacaggcggtggtgcacgttaccaccagcagggtgccggatcatgccatcatgcaggccgcacagtcgccgtggcgtgttgtggcgctgccttggagcgagaaaaccaaaacggggcaggtcaaagacagcggcgtcgtgttcatcggattgtcgctgagtgaccagatcgacacgtccaacacgttgacgcggttctgtgccatggtcggcatcgcggtggtgttgatcggtgccattcttggcaccatcgtcgtgcaaagcacgcttgctccgctgaaacgtatcgagaagaccgctgcgaagattgcggcaggggatttgagccaacgtgttcccgatttgccggaaaatacggaagtcggatcgctgtccatgtcgctgaacaccatgctgacgcgtattgaggaaagcttccacgcgcaggaggaaacgaccgagaagatgaaacggttcgtttccgatgccagccatgagctgcgtactccgcttgccgcgattcacggatatgcggagttgtacaaaatgcagcgtgacatgcccggagcattggaacgtgccgatgagtccattgaacatatagaagcgtccagtgcgcgtatgacggtgcttgtcgaggatttgctgtcattggcgcggttggatgaaggacgtggcatcgatatcacccagcaggtgaagctgacttccgtggtcaatgatgcggctgatgatctgcacgcgctcgacccggatcgtggcatcacctgcggccaggtggtattgcaggcgggatcggatatggaacatccttcgcgtctcgccttccagccgggaaccatgccggacatcacgttgaccggcgatgcatcacgcttgcgtcaggtggtcacgaacattgtaggcaacatccatcggtacacgccggccgattccccggttgaagtgtccatgggcgtgcttccggcgtccatcagcccggaatcattgtctcgcatgccatccaacgagcagtcgttgcatcactttatcgaggccatcgaggtggggcaatccatgcaagtcggcatgaattacgcaattgtgcgattcagcgatcatggtcccggcgttcccgcagatgcacgctcgaagatcttcgaacggttctacacggcggatccgtccagagcacgacagaagggcggtacgggtctcggcatggcgatcgcccagtccgtggtcaaggcacaccatggtttcatctgcgcttccggcagtgacgggactggattgacactgacggtagtgcttccggtggctcctgtggaaccacgtccgttgacgcagaccagtgacgaacgcaaggtcgacaagcgtgggcgcaggccgaaaaaacaatgatgcaaacatgcaaaaaggcatgatctgacgattgttggcgcaagagatggttacatatcccacctcttgcgctaaactgtatctttgatttgtaatcggcggacgattgttctttcgttcgcctgaaggtatgtggattacgtaagagtgaggtgacaatgcctagcggacgcgttcgttggttcgatgcgaacaaaggctatggttttattcagaacgagcagggtgccgatgtgttcctgcctgcagccgccctgccggagggcgtgaagacgttgcgtaagggtgcaaaagtcgagtattccgtggtggagggccgccgtggtccgcaggcaatgggcctcacccttgtggcatccgcgccgtctctggtcaaagcaactcgaccgaagccggatgatatggccgccattgtggaggatcttatcaagctgctggattccgcggggaaccagttgcgccgccaccattatccgtctccggctgaaagcaagaaactggccacgctgatgcgtgccgtggccgataacttcgacgtacaggaataattcatgtccgataccacaatggatcccaaggcgatcgcccaggcggtggccatcgaagtcgccgatgaggatggccaagtcggtgacttcgtcgaagccatcgacttgggagacaacgttactgattttcgttttgaaacctgcatacgtgggtatgagggatggcagtggtcggtgacgttgtatcgcgatgctgagttggaccattggacggtcaatgagtcatcgctggtgcctaccgacaaggcgttgcgcccaccggaatggattccatggaaggatcgtcttgaaccgaccgatttggcggtgaccgattcgatcggcaccaatcccgatgatccacgtatggaagaggggttccgcagaactgaacccgttgagtctgccgaaagcgtttccgacgatgtgcagaccgtcgaagcggcggacggcggcgacaatgccggagcggacgctgacgtggttgacggttcgcaagacgagaatgccgtagcatcggtgacctccgaagaggacatcgacgaggcggttgaggaattcgatctgtcccgcaggcacgtgctcacgcctttgggccgttcccagaccgcgaaacgctggtatgagggaccgcgcggaccgaaatcgttgtccaccaaaacatcggatggcaatccatgctcgacgtgcggattcttcattcctctgaaaggcgaactgaatcttctgttcggcgtgtgcgctaacaagtggagtcctgatgacggtcgtgtcgtatccatcgaccatggctgtggcgaacattccgaaatcgagccgccggaaccgtctcacttgtgggtgcagtcgaaacctgcatttgacgacctgcatatcgatatcatcgcgcaggcgccgcgtgatgaacgcggttccgtcgaactgatcgagcagctgtcggcgaatgaagacggcaatccgaacgatgaggaagaagcctccgaagccgatatcgaagccaataccgtggatgatgatgcgaatcaggaggaagtgctcgaacatacggcccagcaggatgagccggaggtggaatccaccgttgatttgagcgatgacgaagagccggttatcgtcgaatccgaagaggatgaagcgacggatgcggaacccaccgaagccgaggaaacggacactgcagaggaaaacgctccggaagctgagtaatcctgtcttatcgaggatatgaaagaagtccgttccctatgtaaggaagcggacttctttcatatcctcaaaggtttagtgcacgacagtgacggtgcagtcggcgaaattgacgatttgcttggagacggaaccaaggaaatgcgcgtccaagccggacaatccacgggaaccgaccactagatggcgtgcgtaacgggatgccgcgatcagccccttcgcagcggaaatatggaaggcgtgcgattcgatctggaaatcgtcgggaatgccggcagtgggaatctcaaccgaatcgagcagctcgtcaagaatgcgttccgcccgttcctgaccgacggcaatcggcgctatggcgttctcatatccctcgatgacgccaagatccttgagctgccagcagaacatcacctgcaggggagcgtgatgcaaagccgccaggtcgatagcgaatcgcaaggcgtgtcgcgaggtttccgaaccatcgacgccaaccacgatcggccgctggttcttaggcagaggggagccgggcaaatcgtacgtcaccgtgttccccgaaggcgtaagcgcgttggcgatggcatcctgcacgctggattcctcgtcgtcgagaatgcgaactatggtaacgggaacctgtgcggcttcggcaagcgattccgaaagcgagccgaggaaccagcgtgccactctgccgagtgaacggcgtccgactacgatctgctgcgcatccttgccgatctccagcaatgcggacgttcctgtggccttgaccgacgtgagtttgacatgatcctcattgatggtcatgccctgcgaagctttggaaacccagtcgcgaagccgttgcgcgatctcatggcggacttcggcccactgctcttcatcttccggttccgagcccatatcccaggaatgggaccatgcgaacaccgcattgacctgctggccggtaagcgatgcctcgttcagcgcccagcgtaatgcggcgaaggattcgtcggaaccgtcgacgccgacgacgatgtcgtgcaagcggatatctgcgagcatcccggattcggttgcatttagggtggtgttgctcatcttggtgacctccttggtcgttgctatatgtcaagcatatccgttgcgttgcgtcgagagcgcaatttacgcgcggatgaaaacaaacgtcatcgcgaatcggtagagtgttgatggactaacaagagtggaaggacaagcatgttcgaacggtttaccgaccgtgcgcggcgcgtgatcgtgctggcgcaggaagaggctcgtaccctccagcacaactacatcggtaccgagcatctgctgcttggcctgattcgtgagggtgacggcgtcgcagccaaggcgctggcttcaaagggtgtgaccttggatgacacccgcaaacaggtcgaagagatgatcggtaaggggaatgccacgccgaacggccacattcccttcaccccgcatgccaggcaggtgttggagctgtcgctgcgtgaggcgttgcagctggggcacagctatatcggcaccgagcatatcctgctcggtctgattcatgaaggcgaaggcgtcggcacccaggtgctgatcaagatggacgtcaatcttggcgagctgcgcagcgccaccatcgacctgatccgtggcaattccggtgatggcaagggtgatggcaagggcgatttggccaatgccggtggcgtgcaggatcgtcgcaaccagaccggttccgcgattcttgaccagttcggccgcaatctgaccgctgaagctgccgccggcaagcttgatccggtgattgggcgttcgagtgagatcgagcgtgtgatggtggtactgagccgccgtaccaagaacaatccggtgctaatcggcgagccgggtgtcggcaagacggccgtggtcgaaggcttggcgcagaagatcaatgccggcgacgttccggagacgctgaagggcaagcaggtctattcgttggatctgggatccatggtggctggttcgcgctaccgtggcgatttcgaggagcgtctgaagaaggtgctcaaggagatcaagacccgcggcgacatcgtgctgttcatcgatgagatccataccattgtgggcgctggttccgcggatggcgctcttggcgcttccgacatgttgaagccaatgctcgcgcgaggtgagctgcagaccattggcgccaccaccaccgacgagtaccgtaagtacatcgagaaggatgccgctttggaacgtcgtttccagcccatccaggtgcatgagccgagcattgccgaaaccatcgagatccttaagggcttgcgttcgcgttacgagaaccatcaccatgtgacgatcaccgatggtgcgttgcaggccgcggccgatctgtcgagccgttacattcaggaccgtcatctgccagacaaggccatcgatctgatcgatgaggccggtgcgcgtctgcgcatccgtcgtctgaccgctccgccggagcttaaggaacttgacacgaagatcgccaagcttgccgaagagaaggaccaggccatcaagggccaggacttcgaaaaggccgctgagctgcgtgataagcaggagaagctggaagccgaacgcaagcagaaggaatcttcgtggcgtgagggcgaatccgatgtgaagatggttgtggatgaggatgtcatcgccgaagtgatttcccagaccaccggcattccggtgttcaagctcacccaggccgagtccaagaagctcatgaccatggaaagcgagctgcacaagcgcatcatcggccaggacgaggccgtgtccgcgttgagccgctccatccgtcgtgctcgtgttggtttgaaggatccgaagcgtccgtccggttcgtttatcttcgctggccccaccggcgtcggtaagaccgagctggccaagacgctcgccgaattcctgtttgacgacgaggacgcactgattcgtgtcgacatgtctgaattctccgagaaatatgcggcttcgcgcctgtttggtgctcctccgggatacgtcggttacgaagagggcggcgaactcaccgagaaggttcgtcgcaagccgttctccgtggtgctgttcgatgagatcgaaaaggcccatccggatatcttcaacacgctgctgcaggtgcttgatgacggtcatctgactgatggccagggccgcaaggtggacttcaagaacaccatcatcattctgaccaccaatcttggtacgcgagacatcgccaaggccgccaacaccggcttcaacttgggtgccaacaccgagtcgagctaccagcgcatgaaggatcaggtttccgcggagctgaagcagcagttccgtccggaattcctgaaccgtctggacgacatcatcgtgttcaagcagctcaccgagccgcaagtgcgtcagatcgtcgatcttgacgtcaagcagctcaatgatcgcttgttcgatcgccacatgtccctcgagcttaccgacgctgccaaggatctgctcgcgcagaagggcttcgacccgctgctgggcgcgcgtccgttgcgtcgcgtgattcagcgcgacgtcgaagacgccatttcggagaagatcctgatgggcgaactcgaagatggccagcgcgtgaaggtcgatgcggaaggcgaaggcatcctgggcgagttcacctttaccggtgaggcgttcgaagagccaaatacggagcctgctgaaggtgaagtcgcagctgaaaccgaggcacctgccgaatcgacggaatcgacagaacttacggaatccgcagaatctgttgaataagcaatcggtgcgtaagtaacgcgacacacgaaaggccttgaaatcgtatgtaatgattccaaggcctttcgtatgccgaaagtatttcgaaacttgacgaattacagtgtcagcagatcgagatcggcagtgattgacgtgttacgggtgaacagtgtgcgaccctctcgtaccgagcgaagcacttcgcaacgctcgtatacggcgtcgaacacgctggaagcatcaagcacaatgaagtttgcgggcttgcctgcctcaagaccatacgaatcgcgcatgccgagcgtggttgcgccgttgactgtcaggaacttcaacgcatcatcgatctcttcaaaactcatcatctgcgccaaatgcagcacataatcgagaatcagcatcatattgccgttaccgaccggataccagggatcttgcatggaatcctgaccaagcgacacattcaccccagcttcggtgagctccttgactcgcgtgatgccacgacgcttcgggaacgtgtcttgacgcccctgcagatacagattttccgtaggtgcgcaggcgaaattgatatgtgcggccttcaacagcttggtcagatggaagaaataggcattgtcggccgatcccaaggagcaagtgtggcttgccgtggtcttcgaaccgataccggcgcgataggcgagtgcggacagcagttcaagataacgtgagtttggatcgtcggtttcgtcgcaatgcacgtcgatgagcttgtcgtacttcgaagccagttcgaccacggtgtgcatggaacgttcgccgaactcacggcactgctcgaaatgcggaatgccaccgacgcaatcagcacccattttcaggccttcctcaaccaaatccgcgccggattcgccatgaggaccttcataggagtacatgccctcctgcgggaaggagacgatctgcagcgtgacagtatctttcagttcctccttaagctccagcagagctttgagcgaggtaagattcgggtcggtcacatcggcgtgcgaacgaatgaactgcacgccatgacgcatttccttggcgatgccgattttcgcgcgttccttgatctcgtcgacagtgagatctgccttggtttcactccaacgctgaatgccttcgaacagggtgcctgactcgttcaccgcgacgggcttgcgtgcggtaaagacgtaatcaagatgcagatgggtgtcgcagaatggtggacagaccagctttccgcccaaatcgacgacttccacgctcgccatatctttgccttgtgcttcgagtgttgctttgaaattgggtgcaatgctgatgaacttgccgtcttcgacgagaatatcttggattgccgttgtctctgctgcggtgctgcccggcatgccggtggcgatgtgtgcgttgatgaacagttgcgtgctcataatcattccttccaatacgagttttcatgcgagttttcgggttccggcagacgttttgtcatatgtccattgggttacggaagggaacctttgacgtaatcgttgatggttattgtcggcgtattgctttgcggtcacgttacttgatgtgacatgtgtattacttcggattggacggtttgtatggctgttacggtgagggaagtgctcgatgatgccttggttgcgacggcggaaccacaggttgaagttgctggcgatagcttggataatccggtgcgttgggtgttcaccaacgaacgcgaggacgtcgcctcatttctggcaggaggcgagcttctggtggtggaggggcgatctttagttgcggacggtcgtgaaaaacgtgcggacgaatatgtgaaaagcctcgtgaatgctgatattgcggcattgatggtcgaattggttgaagaagtcacccaactgccgaaaatgttggtgaaggcagccaagcatgaaggacttacgattattggattgcgccgtcgcattcctttcgtcgatatctgccagagcgtcaataccatgattgtgcgtgatcagatgcgtatgcagatgcaagtggacgttatgtcaacttcgttgcgttctgagcttgctcaagcgtccaatcccaaagccgttgccgatggcattgcgaacctgttcggcgaggatgtggtcatattcgacgtggacggtcttgaagtcgcccgagctggacagaacatcaataccgctacagattgcggcattgtacttgcactggaggaacagaaacggcctttgggtgctttggagatcagccagcgcaatacggtgttcgatgaagcgatgtgcagaaggatcgaacagattgccgctccggttttgacactgtatctcgatgggggagcgcgggtcggcatggtggcgcatctgattgcggggccggaagatggcgtgcatgtttcgccgatggaggcgcgtgagggccatgccatgcttgatgcgttgggattcgccgcttcgggcgtgtatatgccatttgccatgaaactcaagtcggtggccaacgccatgccggcaatcgtgtcgatgatcgacgatttcgaatccaacggcggttgcgaatcgatctgtttgttggaaggcgatttaatgatcggttttctcgcggcgcaagacagcggcggcgatgtgtcggtattttcagatcggtgtttgcatgcgttgacgcaagtcgctgcaaacgaatacgtatataccgtgcatggacgcgcagcgttggacacgatttcattgatggacgcgttcggtgcgttgcgcagtgtgattcgaacatgcatttcgaacgatgcggaatgcccgtatggaaccctcgaatgtgtggattcctcgttgctggaacgcatgttgggaatggaacgtaccgatgaggccgtgcgcatggtgatcacgcagacggttgggcatgagcttatgcataacgccatgctgatcgacacgttgtgtgcctgtttcgacaatctcgacaacaagaccggcgcatgcgagcaattaggtatccaacggcagacattgtacaaccgattggacaaagtgacacagatcgtgggcatagcgcctaccgataaaatcagctggtcaatgctgcttttaggtgcgaaaatggcgaaatcgcaacataatcacaccatatcttccacttcggcgctgtaagcaaggggaacttggcaaaacgtcaaaaacaaacggttgcggtttaacaatcagttcactttggcgcaaatacttcgggcgatagtcagagtcacaacgttcgccgggtatgaagaaaacgcgaacgtacagacagattcagcagaagaaagcaggtgacatgatgagtgccagtgcaacaatcgcaaccgccaacagggcttccgtgtctgaacagtccgaagagcagaagatggtcaagaaagtggccgtctcgtctttcctcggcaacttcattgaatggttcgactacgcttcctattcctacttcgcgaccaccatcgctttggtgtttttcccgtccggcaatcacacggtcgccatgctgcagacgttcggcgtgtttgcactgtcattcgtgcttcgtccgatcggtgcactgttttggggtaacttcggcgataagaagggacgcaagggcgctcttgcgatttccatcatgttcatgtcgggtgcatcgttcctgattggctgcctgccgtcatatgctgcgatcggcattttcgctccggcactgttgctgctgcttcgcatggtgcagggcttctccgcttccggtgaatatgccggcgccgcaaccttccttggcgaatacgcgccgaccaagaagcgtggcatctactgctcgctgattccggcatccaccgccatcggtctgctcgtaggctccacgctcgccaccgtgatgaccgcttcgctgagctctgatgcactgacctcttggggatggcgtattccgttcctcatggccggcccgcttggtctgatcgtgcatttcatccgtaccaagctcgctgattcgccggtgtatgcttccatgaccgaagctttggacgacaagcagcagttcgcttccaccactaagagcgtctccccgctgcgcgagctgttccagaaccacttcaagactttggtcatcagcttcggtgcctgcgtgctcaacgcggtcggcttctacacggtgctcacctacctgccgacctatctgagcgacacggttggcatggctgccgcacagtcgtccaccatcaccaccatctgcctggtactgtatgtggctttggtgttcggcatgggtcacatctccgacatgttcggacgcaagaaggtgctgattggtgcatgcgtggccttcatcgtgctcaccgttccggccttcatggcgctgaacaccgcacagttctggccggtgctgatcgttgagctcgccatgtgcgccaccctgaccgccaacgacggtacgctttcgagctacctgactgaaaccttcccgacatcggttcgtttcaccggcttcgcattcagcttcaaccttgccaacgccatcttcggtggaaccgcgccgttcatcgcaacctggctgatctacaccaccggttcgagcatcgctccggcctggtacatggtggcggtggccgccgtggcactggtcgccatgatcctctctcacgaaaacacggataaggatctgagccgcatctgagaagaaacggtttttacgaaacaattcctcgaaacaataaacgccgtccctgaaacattgattgcaacatcgattcgcggggacggcatcatcgcaatcattatcaattgttgaaacgcaaaccaacaacagcacataaaggagcaatcatgagcagcagccgtcggatggaccatatgacctggccggaaatcgaagcatcgaaatcaaagccggttattgtgccaatcggctccaccgaacagcatagccagcatcttccccttggtgtggacgccatgatcgccagccatgtgtctgaagacctcgccgaacgcatcgacggcatcgtggcaccgaccatgaactacgggtacaagtcgaagccgctttccggaggcggcccattgttccccggcaccatcgacatgaacggtgtgacggtgatcaatcaaatgcatgatgtgcttggcgagctgatcgcggacggtttcaccaaaatcgtggtgatgaacgcgcatttcgaaaacgaggcattcattatcgaggcaatcgatctgatcacccgcgaaaccaagggagtggccaccatcgtcgaaaccaactggtgggatccgctgccggagaacgtggtcgagcagatgttcgacggactcgtgttccccggttgggcgttggaacatgccgcagtgacggaaacctcattgatgatgcattacgagccggaattggtgcatatggaccgtgtgattgacgaaggcaatgtcacaccgaaggcttacgtgcgctacccggtgcgcaagggcgacgttccggattacggaggactggccactcctgcaggttccagcgccgaacgaggtaagctcatcgtcgatgcctgcattgatgcggtggccgatatttgtgctaccgaattcggcgaatgatagttgaatattctgtatggtgattgcgcatgtgagaacacgtgcgattatacgaagaaggctggtatgtgacggatgtcgttacgtaccagccttcttgattatgcctgagtgaagtccagctgatatttgaccgcatctctgtggtgcaaccaaatatcaggatgtgcgacttacttgatggcgttcagccactgttccttggtggccttctcggattcgagcttggccttcttcttcggatcggattccgcggcgatcttctgatcaagctcagcgagctgagcgttgagctgttcttcgaaggaggacttgcgggcgtcggcttccggatcggactgcttccaagcggcatcctcaatggccttgatctgcttgtctacagcatcgagacggccttcgatgcggcgcacttcgtcacgcggcacgtaaccgatctggtcccactcctcctgaatggcggcgagagcctgacgggcctgcttggcctcttcttcgcttttgacgggaaccagcgcctcggccttgaccagcagctcttccttcttggcaagattttccttctcggaggagctgatctgatcacgatcggcctgacgtgcgttgaagaaggtgtctgcggcggcgcggaaacgctcccacatggcatcatcgtcacgacgaccggcacgaccggccttcttccaacgatccatcagctcggtgaacttgcgggaggtttcaacccaagcggtggaatcctgcagcgcctcggcctcggcgatgatggcttccttggtggacttggcggaattacgctcttcgtcacggttctgcacccacttgcggcgggcgaaattgaacttggtgcgggctgcggagaaacgagcccacagggcgtccgcatcttccttgtcgatgcggacgttgttgcgctgatgctcctgccactgctggaagagcgaacggaacttgtctgcggtggaacgccagttggtgttttcgtcgagggaatcagccagcgcctcggccttctccacaatggcggtgcgctcctcgacggccttggcgatagcggccttgcgtgcctcggtcaacgcggttttcttggctgcgccttcctccttcagcgcctcgaactgggccttgagagcggccagatcacccaccactgccggctgttcggtttccgcggacagcgtcttgatggtctcgtcgatttcgcgggacttcacattgttggacttgagcttgttcgcgaacaggtccaacttggccttcaaatcaaggtaacggcgggcatacagagccagcgcctcttccttggaggcatcagggaactgaccgacctcacgttctccttcgccgtccttgacgaacacagtaccatcgtcggcgacacggccgaatgcttcggcggtcttcacatcggcatcggagaagccggtggatgcggcagccggagcggtgtgctgtggagctttcttggcgaaggccgcggggctcggagcatggggcttcatcgaagccgggctcggaacggccggtttgctggccttgactgcgggcgtcgttgcctgctcggtggtttcattggtgttctcggacgcggtgacattctcgtcggccatggccagctcctttaagtaagcttcatgtagtgcaggggatgcggatcgtgcgaacgtgctttcaaagcctgaaaaacgcgctgcattttccgcaacctcatttattatagggaatcgtggcaaaaggcgcatctatttcaggatttccagagtggctcccctctgaacgtgttgtggagcagcgtgttatcgacacgctccgtgaagttttcgagctcaatggcttcattggcattgaaactcgtgctgttgagcagggttcgagtctgctcaagaagggcgaaaccagcaaggaaatttacttgctgagccgccttcaggaggtcggtcatgagtccgacactccgattgaggaccgccttggtctgcacttcgatttgactgttccgctgagccgttatgtggtcgaacattccggcgatttggcattccctttcaagcgttggcagattcagaaggtctggcgtggcgaacgcccgcaggaaggtcgtttccgcgagttcgtgcaggccgatatcgatgtgatcggcaacggtgatctgcccgatcattacgaggtcgagctgccgctggtcatggtatcggcattggaacgtctgcgtgagttcggtttgccgaaggccaccgtgcatgcgaacaaccgtaagctttctgaaggtttctaccgtggtcttggcttgaccgatgtcgagggcgtgctccgtgagatcgataagctcgacaagatcggtgccgacgaagtggccaagttgctggtcgaaggctgtggagccgacgagaatcaggcacgtgcgtgccttgagctggctgaactgaccgcagctgacggcgctgaactgtccggcaagttcgacacgctgtgcgagaagcatggcattgccaatgattccgaggcgtacgtgctcgcacgtcagggtcttgacacgttggcgatgattgttgacgaggccgctcgtattcgcccgggctccgtgatcgctgatttgaagatcgcgcgtggtctggattactacaccggttccgtgtatgagacgttccttgacggtgctgcggctcttggttccatctgttccggcggtcgttacgacaatctcgcatcgcagggcaacaggaagtatccgggcgtgggcctgtccattggcctgtcccgtctcgtttcatacatgctgcacaccgccggtgcccatgcgaatcgcgtgtccccggcttccgtgctcgtggccgtgtggaacgaggaggaccgttccgcttccaaccaaatcgccaaccagctgcgcgcccgtggcattgcggcagatgtggctccgaccgcagccaagcttggcaagcagatcaagtacgcagacaagctcggcatcccatacgtgtggttccccgcggacaagtccgcgcaggacgcttcggacgaagtcaagaacatcatcacgggcgaccagcagccggccaacgcacagtcttgggagccggatactgtgtatgcccagcaaaccgttaccgtagaagcctgaaatcgcaagacttcaatcattagagaacaaggaataggggaagcatgagccagacggcttatagaacacatcatgcaaccgaagtgaccgaggaactcgtcggtcagaaggtgacgctctccggttgggtcgatcgtcgtcgtgaccacggtggcgtggccttcatcgatcttcgtgacaacaccggtcttgtgcaggtagttatctacgacgaagacatggcacgtccgctgcgctccgagtttgtgattcaggtggtgggcgaggtccgcctgcgtccggacggtaacgagaatgatcatctggccaccggcaagatcgaggttgtggcggaaaacatcgaggtgctcgccaagtctgacgcgctgccgttccaggtgtccaccgcgttggaaaacgagtccgagaacaagctgccgggcgaggaagttcgcctcaagtaccgttatctcgacctgcgccgcccgtccatgcagcgcaatctgaagctgcgttcccagatgtcgaaggctgctcgccacgctctggaagagatgggcttcgaagaggtcgaaaccccgaccatgatcaagtccactccggaaggcgctcgcgattttgtggtgccggcccgcttggtgccaggttcttggtacgcgttgccgcagtccccgcagcttctcaagcagctgctgatggtttccggcgtggaacgctactaccagctggcccgctgctaccgtgacgaggatttccgtgcagatcgtcagccggagttcacccagctcgatatggaaatggcgttcgtggatcaggaagacgtgatggccatggccgaaaaggtcatcgccgccatctggaagtccgcaggctatgagatccagctgccgattcagcgcatcacttggcaggaagccatggataagtacggttccgacaagccggatctgcgtttcggcaacccgctgatcgagctgaccgactacttcaagaacactccgttccgcgtgttccaggctccgtacgttggtgcggtgctcttcaagggtggcgcggccacgcctcgtcgccagttcgacgcttggcaggattgggccaagcagcgcggcgccaagggcctcgcctacgtggtgttcgctgagaacggcgagctcaagggacctgttgccaagaacctgtctgaagaggagcgcgctggcctgaaggaagccgttggcgcagaagacggcgatgccgtgttcttcgcagcaggccgtcgcacctccgctcaggagctgctgggtgccgtgcgtgtggaactggccgatcgcgccggtctgctcaagccggacgacttcgctttcacttgggttgtggacttcccgctgttcaagcccaccgacgatccggatgacgacgatgtggcagtcggccactccaagtggacctccatgcaccatccgttcaccatgccgtccaaggattggatcgacaccttcgacaaggatccggagcacgccatgtctgattcctacgacatcgtgtgcaacggtaacgaaatgggcggcggttccgtgcgtatccaccgtgatgacattcaggatcgtgtgctcgatgtgctcggcatcactcctgaagaggctgccgacaagttcggcttcctgcttgaagccttcaagtacggcgctccgccgcacgctggcatcgctctcggttgggatcgtaccgccgccatcctggctggcgccgactccatccgcgacgtcatcgccttcccgaaggctggcggcggtcgtgatccgctgaccggcgccccggctccgatttccgacgaacagcgtgcggaaaccggcgttgattatgatccggaagaagacgaagactgatagtgttttcgctttgagataacaggctgtctttgcatgagagaccgtgcaaggacggcctgtttttattgtttacgctgtctattttctcttgctgccggtatggtggagcaaagatgagtatctgaaatattatgagaaagaactgaatctgtagtatgaatttgaagcaatcgttggaaaaacatgattttcatggtgtctggatgcgacttctcgcgttggcgatgatactgattgtggcagtgagtgcactcatcgcatccccagttagtgctaacgccgccgaagtcggagatccctccgcagtcaagggcaaaacctacgcggtcggcaccgatactacattcgcaccgttcgaatatcgcgagaacggcaagatgaccggtatcgatatggaactgatccgtgccatcgcccaagaagaaggattcgaagtcaccatccaatcattgggtttcaatgcagcattgcaggctttgagctccaatcaggtggatgtggtgatcgcaggcatgtcaatcaccgacgaacgcaaggcgacctacgatttttccaatccttacttccagtccggtatccagatggccatcgctgaaaacaacgatagtattaccagctacaaggatcttgacggtaagaccgttgtcgcgaaaaccggatcggaaggcgaatcctacgccaaacagcatgcaagcgaatacggctataccgtgacttccgtggaccagtcatcaaccatgtatgagatggtcaaatccggcaatgcggatgccgtgtttgacgactatccggtgcttgcctacggtgtttcccaaaacaacggtttgaagatcgtgactccgaaggtgccgcatggtgaatacggcatggccgtgaacaaaggcaagaacgccgatctgctggccgccatcgacgatggtctgaacaagctcatcgcttcgggcgagtatgagacgattgtcgcacagtatttgggtgccgatggcgcgaaggaacaggtcgaggcgatttccggcaaggtcaccgacaacggtgccgacggtgaggcgcagaagaaggtcggtttctttggtctggtcaaacagtcgatgccggctttgctgactggtctgaagaacacgctgttgatcacgttgctgtcgtttgtgatcgcactggcgttgggtgttgctttcggcttgatgaaagtatcggagaacaagattctgagaggcgtgtccaaggtttatatcgcagtgttccgcggcactccgattctggtgtgggcgttcttcttctatttcggtgtgccgcagcttatcggacacagtgtgaacatttgggttgcaggtgcgttgacgttgtcgctcaattccggcgcatatctggcggagatcgtgcgtggcaccgtgcagtccgttgactctggtcagatggagggagcacgctcgcttggcctcaaccatcatcaggccatggcgcgcgtgatcatgcctcaggccactgcaatcgccatgccgtcgatcatcaaccagctggtcattatgatcaaagattcctcgctgctgctggccatcggctttggtgaattgctgtatcaggcgcagcaattgtatgcggcgaacttccgcgtcaccgaaacgttgctgatcgtcggtgtgatgtacttcgtggccatcaccatcctcacatggctggccaatatcgttgacaggaaggtgaatcgatgagcgagaactgcaatcacggcaacaatgatggcgaagtgatcatcgacgtcaagaatctgcataaaaactatggtcatatggaagtcatcaaaggcgtcgatcttacggtacgcaagggcgaggtgatctgtatcatcggaccgtctggtgccggcaaatccaccatgttgcgttgcctgaacggacttgaacaggcatccagcggccagatcgtggtcaacggtcatgatctgggtgatccgcatgtgaacatcgaccaggttcgagagcaggttggcatggtgttccagcatttcaacctgttcaacaacatgagcgtgattgacaacatcacgcttgcgccgaaactggtgcacaaggaaaccgacgagcaggcgcgtgaacatgcgatggcattgctgaaaaccgtgggattggccgaaaaggccgatgtcatgcctcgctcgttgtctggcggtcaaaagcagcgtgttgccatcgcacgatccttggccatgcgtccgaaggtcatgctgttcgacgaggccacgtcggcgcttgacccggagatggtcggtgatgtgctcgaagtcattcgtgagctggccgaagacggcatgaccatggtgctggtgacccacgagatgggtttcgcccgcgaagtggccacccgcgtgatcttcaccgacgccggcgtgatcgaggaggaaggcactccggacgagatcttcaaccatccaaagagcgaacgattgaagacgttcctttccaaagtgctctgagtgctctcttggccccggcgattgcttaatcgctgatcgcggatgaaatgctgcgatcgtgtgacggatggtcatacgaatctgcatgtaaaagacaggcgaatgtagggtgaaattcatcttgcgttcgcctgttcggctctttctcgttgcttggcgttcctacgttggtatgcatgagcattggtgatacgtggcgtcgcgttgtggatggtttcaaatccaaggtgcccgaacgagtggtgttcggtgcggtggttgtattgttcgtaatagcggtgctggctatcgaattgccacgatggtggtagctgccacgtacggcgctcaagatatcggtattgcggtcgataacgcgctatgatgcattttgggacaacgttgtctcatatttcgagcacgtcagggggtggtgacggccgcggaaacatggctttcatatactatccgtatgacagatatcaaagaaacgcaagagacgcgcccgatcatgccgggtacggaagacagcgaccgcccgctggtcgaattgacccacgttgaaaagcactacggtgacttgcatgtgctcaaggacatcaacctcaccgtcaagaagggcgaggtgctggtcatcgtcggtccatccggttccggcaaatccaccatgtgccgcaccatcaaccgtttggaaaccatcgattccggcgacatccgcatcgacggcaagccgttgcctcaggaaggcaaggagctcgccagcctgcgcgccgaggttggcatggtgttccagtcgttcaacctgttcgccaacaagaccattcttgaaaacgtgacgcttgctccgatcaaggtgcgccatatggataagaaggcggccgaggatctcgccatggatttgcttgcccgcgtgggcgtggcttcccaagcctccaagatgccgtcacagctttccggcggtcagcagcagcgtgtcgccatcgcccgagcgctcgccatgcagccgaaggtcatgctgttcgacgaaccgacgtccgcgcttgatccggaaatggtcaacgaagtgcttgacgtcatggtggagctggctcacgaaggcatgaccatgctgtgcgtgacccacgagatgggcttcgcacgcaaggtggccgacaaggtcgtgttcatgtccgacggccagattcttgagcagagcacgccggaggacttctttgaaaacccgaagaccgatcgtgccaaggacttcctgtcgaagattctcacccactgaagtgactgacgggaataagacagaagaaggattttcgatatgagactttctatgagggcgaagcgtatgctacgcagggttatagcgactttctgcgcatgcgcatgcgtgttcgcagtgtccgcctgcggcgcggacgacgccgatggcaagattcgcgtcggtatcaaattcgaccagcctggtctgggcttcaaaaagtccggcacgtatgtcggcttcgacgttgacgtagccaagtacatcgccaagaaactcggctattccgaagaccagatcgtgtggaaggaagcaccgtcgaagcagcgtgaagccatgctgcagaacggtgacgtcgattacatcgtcgccacgtactccatcaccgacgaacgcaagaaggtcgtctccttcgccggaccgtatttcgtggcgggtcaggatctgctcgttcgtaaagacgaaacctccatcaagggacctgaggatctgaacggcaagcgtttgtgctccgtgaccggttccacttccgcggtcaccgtcaaggagaagttcgccaacgaagtgcagctcatggagcagcctggttacgcggagtgcgctaccgcactgttctctggcattgttgatgcggtgaccaccgacgacattattttggctggtcttgcctccgcgtcccgcggccgtctgcgcgtggtcggcaagccgttcacccaggagtattacggcgtcggcatcaagaagggcgatacgaagctggccacccagatcaacaacgccatcgccgatatgatccaggatggttcttggcagcgtgccatttccgacaacacgaagggcaccgcatacacgccgaacgcgaagtacaatccgccggagccgactgagggggagagataatggaagcgttcatctcattgttcagccagtacaatgtgccggctgcgttcttggtgaacattgaactgaccctgtggtcggcgttgttctccacgattcttggcgtcatcctcgtgatgatgcgcatctcgccggtcgcgtcgctgcgtatggtctcgggtgcttacgtcgagctgttcaagaacctgccgttgaccatcatcatggtgttcatggtgctgggtgcctacgcgcagctgaagctcagcttctccgacacgttcgccaccaacttcttctggcttgccgtcaccggtttgagcctgtatacggcggccttcgtgtgcgaatcgctgcgatccggcatcaacaccgtgccgcttggccaggctgaagcctgccgtgcgctgggattgaacttcatgcagtccgccacccagatcattctgcctcaggcgttccgtggctccgtggcaccgctgggcaacacgttgatcgcattgctgaagaattccacggttgcggccgcggcttccgtcgccaccgaaacctcgtcgttgatgagcgaaatgatcgaataccgttccgacgtgattgttccgatcttcctgatcttcgcattcggttatgtgattctgatcattccgatcggcatgctgaccacgtatctgtccaacaagctcgcggtgaggaggtgacgcaccatggcaagcgatgaaagcgcggtgctgttcgaccagcccggtcctaagacccgtaaaaccattcgtatcgtcaactggattgccggcattgtctttgcaatcgtagttgtgctcattctcatgaggcttcacaatccgccggatggcgagaaccagctgagctgggagttgtggaagccggcgcttgacgctgaagcatggaccgatttctatctgcccggattgtgggccacgattcgagcttccgtgttggcagtgatcggcgcagtgctgttcggtctgattttcggtatcggccgtctgctgccgaatatcgtgattcgtgcgatttccggcgccatcgttgagttcgcacgtgcggtccctgtgctgctgctcatgatcttcttctggcgttggttcgctttcgcaggcatgtcaagccccgcatactgggctgtggtgctcgcattggtgatctacaacggttccgtggtggccgagctggttcgttccggtgtcggcaacctgccgaacggccagcgtgaggcgtcgctcgccttgggcttgacccgcacgcagtcgctgatggaaatcgaagtgccacaggccatctacgccatgcttcctgccgccgtgacgcagttggtggtggtactgaaggataccgctctcggctcgatcatcatgtacaccgatttgctgcaggaatcgcgtcgacttggttcgatgtacttcaatattctgcagacattggttgtggctgccgtcatctacttcatcgcatgctggctgctgagccgtcttgcggaatggctgccggaacgcatgcagaagcacactgcggcacctgccgaaccggaaccggtcgctccgatcgccattatggatccgtcgaacgtgaaccagatcgccgtggctagggaaggtgtgccgcttggcggtgcccagcgcctgtaccatgtgcaccatcgtggttccaacgcgtcgattcgccattggcgtcagacccgctatgttcagggattcgatgagacgcatccggaaagccaagtcgagttcgataagaacggcaggccgatcaaagatacgtccaagcaggacaagctgagattcgacaagccgaaatcagacaaatcaaagggtgataagcccaagcagtgacgtcatttgatctgagaagaccgatagggcgctggtttcttgcaaagagcgaggaatcagcgccctattgcgtgaaagaagtcagacaaaacgtcagaaaagcgggatgcgacgattgggtgcggcgatgccacggttcaatcgccgcatcgtctatcataggggacaagcgaggaggcttgacatgtcagacaaagacaaggatgcgaagacgtcgtccattgcgaagacgttgaacaaggttgaggacaggcttgagaagggggagaactgcagttccgttgccgaagggcttgcgaatgttgccaaggccagcgagttgctcagttccgtgtggacgcttccgcccagtcagttattgcgattccatcatgatacgagggtcgctgcaatcgatggcgattccacgccgggtttcgacggcaacaaagatgatgcggaacgattcattgcgatcagttcttctgaaatcgcacgatatcagcggcttatgtacgccaatggagtgaaaggttcccgccgtcgtctgttgattattctgcagggcatggatgcttccggcaaaggcggcatcgtgcgtcacgtattcagccagggcgatccgatgggcatgcattatcacggtttcggtgctcccaaaggcgaggaaaaggaccacgattatttgtggcgcatcaaacgggaactgccgcagaatggttggatctccattttcgatagatcgcactatgaagatatcgtcatgccgcgcatttacaaaacctatccggaagaggtatggcaggcgcgatatgacgaaatcaaccgattcgaatcgcaattggtcgcggacggatgctccatcatcaaaatattccttgtggtgagcaaagaggagcagaaggagcatttcctcggcaggctggaggatccgaccaaatattggaagttcgaccccagcgaccttgaagcgcgtgcccgttggaacgactacatggccgcatggcaggacgtgttcgcgcgtacgagcaccgagcaggcgccctggtacctggtgcctgccgacaatcgttggtattcaagggcggttgtgtctgaactgctccgtaacgtattgaagaacatgaacatgatctggccgcccctggaagtcgacgccgacgagatgcgacgtcagttggaaacgctgtagtcgaagaacacgacttcgccgctcgactgtgtggtgtccaaatcgacggttccggtgatggcccaatcatggtcgccatcggaatcgtcgatgatctgacgcaccttccaactgtgctcgctgttctccttggaatcgtcgaggatgaacagttcgcggctacgggccttcgcatccgtgttgacgtattcgtgctcatcgtagaagtcgtcgagcgcatcctcccattcgtgaacgccataaccccagtctttgtcaagcgcgccgagctcgtcgggtttgtcgagatccatgagctgtacgcggcggaacatggcgttgcgcacgagcacggtgaggcctcgacgatcctccaccacggcctgcttcgcgccgggcgcggccaggttcgcggcggcttcggaagcgtcggtgccggctcccgcgttctcccattcgtcgaccagcgaggagtcgatggaacgaaccacaacgcgcagccaggagatgatgtcccgtaactgttcgttgcgcttctccaaaggaacggtacgcgccagcgcgcgatatgcgtcagacagatagcgcagcagcgtgccttcggagcgggcgatattgtagcgcgcgatgtaaccggtgaaatcggaggccgtttcgaccatgtcccggatcaccgatttcgggctcaaccaataatcattggcccaaggcacatcgtgacggtattcgtcgaacgcggcctgaagcatgtcttccaatggtttcggatacgtgatctcctgcaagcggtccatacgttcgtcatagtcaagaccgtcttccttcatgcggatcatcgccgcgtcgcgggcttgacgttcctgcgcgcgcaacacctgcttcggatcctccaacgtggcttccaccatggaaatcacgtcaagcgcgtaactttccgattccggatcaagcagttccaacgcagccagcaggaacgggctcaacggctggtcaagcgcgaaatcatccggcatgtcgacggtcatgaaatagtccttgccaccatcatcgcggtcttccgtttcgatcacattcgtgtcgaacaaggtctggaagatctcgtcggcacgatcatgaagacgctccttctgttccggagtctgcgcagaatcgtcgatcaggcgatcgatgcggtagcgtgcgtcgccgccctgcgccacttcgttcaacaccatggaatgcgtgaccttcatatgcggcaccaaagtttcagggtccgcgtcgatcagcttatcgaacgtgttctcattccacgtgacgaagccctcaggcgccttcttgcgcttgactttcttgagcttcttcgggtcgttgcccgctttggcgagggccttggcgttctcgatttcgaattccggaccctcggcgatgaccaagccctccgtgtcgaagcccatacgtcccgcacgccccgcgatctgatggaattcgcgggcacgcagcttgcgcatcttcgtgccatcgaacttggtcaatgcggtcaacaccacggaatgaatgggcacgttgatgccgacacccaacgtgtcagtgccgcagatcaccggaagaagaccctgctgggcgagttgctcgaccagacggcgatagcggggaagcatgcccgcatggtgaatacccacgccggtacgcagcagacgctgcagaatcttaccgaacgccgtggtgaacttcgtgcccttgatcgcctccgcaatggccgcacgttgctccttgctggacactcccgtgctcgccagggcgttcgccgtctccaatgcggcgtcttgggagaaatgcaccacatagatcggcgtttcccctctgccgaacgccagttcgacggttttctccaacgggtcaagcgtgtactcgtacgtcaacggtaccggacgcggcgcatcggcgatgatgtcgacgtccgtgtccgtcatgtcctccaacttgtcggcaatcgcatcgacattgcccaatgtggcgctcatcagcaaaaactgcgtgttcggcaatgtcagcagcggaacctgccaagcccaaccacgctccgaatcgccataataatggaattcgtccatcgccacacagccgacatcggcatgacggccctcacgcaatgcctggttcgcaagaatctccgcagtgcagcagatgatcggcgcatcggcgttgatgtgcgtgtctccggtgatcatgccgacgttctcacgaccgaacacctccaccaaatcaaagaatttctcagacaccaacgccttgatcggagccgtgtaatacgagcgacggcccgtgcacaacgcagcgaaatgcatacccaacgccaccagtgatttgccggagccggtgggcgtgttcaaaatgacatgatcgcccgcgagcaggtccatgatggcctcttcctgatggggccacggctcaacacctttgacgtccgccacccactcgaaaaagcgttcgtagatctcgtccgtgtcgatgttgcgctcgccatcgctccaattcggcgccaaggcgcccaaagaaccgtaattcgtatcgtcagccatgattgccagtctagcggctggcatgaactcaaatgtcgaacgtgtgttcgaattattgcgtatgttgcggtacagtagaaattatgactgaggatttgtttggtgcgatggacgctcccgaagatatgacacgcccgctggccgtgcgcatgcgtccgtcgagcgtggacgaagtggtgggccaatcgcgggtgctgggacagggctctcctctgcgcagactcgccaatccggcgtccaaaggctcgctgaccgcgccgagctccattattctgtttggacctcccggagtcggcaaaaccacgctcgcctatattgtggccaaacagtccggtcgagtcttcgaagagctttccgcagtcacctccggcgtcaaggacgtgcgggatgtactcagacgcgcccatgatcgtcttgtcgcggagggcaaggaaacggtactgttcatcgacgaagtgcaccgattctccaaatcgcagcaggatgcattgctgccaagcgtggaaaaccgtgacgtcactttcattgcggccaccacggaaaatccaagcttttccatcatcaaaccgttgttaagccgatccgtggtcgtcaaactcgaatcgctggaacccgacgacctgaaaacgctcatcaagagggccatcgaaagcgagcgtgggcttaaaaacgaagtcaaaatcaacgacgaagccgttgacgaaatcgtgcgtatggccggaggcgacgcgcgaaaaacattgacgatccttgaagccgccgcaggggcgcttaccggagaccaagcgcgcaaaaaaggtgcgaaacggcctgtcatcacgtctgacgtggtgtcgcaggtcatggatgtggccaccgtgcgctatgacaaagacggcgacgaccattacgatgtgatttccgcattcatcaaatccatgcgtggatccgacccggacgccaccatgcactacttggcacggatgttgcgcgccggcgaggatccgcgattcatcgcacggcgcattatgatcgcagcttccgaggaagtcggtatggcggctccgcagatactgcaggtcaccgtcgcggcggcacaagccgtgtccatgatcggcatgcccgaggcgcgcatcattctcgcggaagccgcgctcgccgttgccaccgctccgaagtcgaacgccagctacaacgccatcaacagcgcgctcgccgatgtggacgcgggattgatcggtcaggtacccttgcacctaaggaatgcgccgaccgccctgatgaaaagttggggcaatcatgaggggtatcggtacgctcatgattggccgggagccgtggctccgcagcaatacatgccggacgagctggcagggcgggaatactaccatccgaacgatcgcggctacgagcatgagatcaaaccgagactggagaaaattcgcaaaatcctgcatgagaagaacggtggtcaaaccggtaactctgatcgagcctagtgtggtgtcagttctcattcttcgttgtcgttggactaggggtccgctaaaattcttcgttggggttgatgcctgcttgctatgagcaaggcccatgcgtcaatcgcggcgtcgcacatggccgcaggaaaaagtgcgcggaaagtgattatgcaagaacggaatacaacgctcgaaaccaccagccatatcagtcgaaacagtagtgaaaacgtcaggaaaatgccggacgaacgcattcccggcaagctcattggagccatcgtggcggtcggctccctcgccttcatcggcattctcaccgaaaccgtgatgacggtgcttttcccgcaactcatgcgggaattcaacgtcgacaccgcaaccgtgcagtggatcaccaccatctacctgctggtggtcgcggccaccatgccgttgtcgtcgtatcttaaccgtcgtttcaagcaccgcacgttgttccttgccgcggtggcgcttgccgtgctcggctcgctcattatgattgtcggtcatgcgttcccggtcattctcattgcccgtgtgattcaaggcatgggttccggtgtggccacgccgttgatgatcaacatcattcttgaacagtcgccaaagagcaaagtcggtcgtttgatgggcgtcggttcgctggtcatcaccgtcgctccggcaattggtccgaccgttggtggcgcggtgtcgagcattctgccatggcgtgcgattttcgtgattgtcattccgatcattctgctggtctcgttgccggtcggtttaaaatgcgtcgaacagcatcgcccgacggaagaggcgcgtctcaattcgttgcagttcgtgtcgattgtgcttgcattgtgcggattggtgatgttcctaaaccaagctggagtggccgtcagcgccgcggtttccggcggcagcgccacggtgtcggcagtgttcgccgtggtgagtctgatcgttggattgggggcattgctgtttttcggctggtcgtcgaagcgttcgttctcgccgctgatccgtttgggctggctgcgtgacccgatggtgttgttacatttgatcgcctacatgctgctgccgatcgtcggcatcggtttcggttatgtgatcaccaatgtggcgcagctttcgttgggaaccagcgcgttcctgtccggcgcgttggtgctgccgggtgcgctgatcggcgcgtttttcgcaccggtgggaggtatgctgtacgaccgtttcggaccggtgcgtccgattctcggcgcgtttttcgccgcgatttgtgggccgattctgctgctggtattttccatgcgactgacacccgtcacgcttgccggtttctacttcattttcggatttggttattcgcttggtttttccaatatcatgaccaatgcgttgcgtaacatcgcacctcagttcacgccggacggcaatgccgtgttcaacacctgcctgcagttcggcggcgcggcaggcaccgcgctgttctccacgattctgtcggtggctcaggctggcgcaggcgaagaggggggtgccacgttccgtcacgctacggctgtcggtggcagctggacgttcgctaccatgattggtatcgtggccattgccatctgttgcttgattgcggcgttccgtattggtgcgaaacgtaatagcaggctatagaaaaagcctgtagcgtaaagtgaggaaagcgttccgtcaaggaatatcggcttgctatgctgtctctaccgtgttattgagaggacagcaatgagactacaacacccgtatagcggcatcactaccggtctgctcaagccgattacggcggcgctttccatagttgcgctgcttgcgggctgtggatccgtggaggcgaaggattcccagcaggaagtcaccagtgccgataaggtggtcagcgtcaatatcacggaaccatcgaatggcttgctgccaagtgacaccagcgatatggccggttggaaaatcgtcagccagctgtatgacggcctggtcactttcgatgcggaaggtaatgagacgttggtcgaggccgaatcgatcacgccgaatgacgacgcttccgaatacaccatcgcacttaaaccgaatctggcgttctccaatggtgagaagatcaccgccgacacgtacgcgaaaagctggtcgttcgcggccaatgctgccaatggacaggtcggagcctccattttcgaagatattcagggctatgatgagctgcaggatgcaagtggttccaaaaccgcgcaattgtcaggccttaccgtggtcgacgacactacgctgaaggtcaagctcaaagcgtcgaattcggcgttcctgtacaaaatcggagatatcgcgtttctgccgatgccatccgaagtcatcaagaatcccaaggaatacgggcaaaagccgattggcaacggtccgtacaagctgaaggcgtacaaaagcggcgaagaaatcattcttgaaaaagacgactcctacaaggggccgcgcgaagtcaagaacgcaggcatcgatttcaaggtgtatcaaagtcttgacgcggcctattcggatctgctggcagacaatcttgacgtgcttgatgccattccgacttccgcgttgaaaacctatcagaacgaaaagaacatcaccgccgtcagcaagcccggtccgtcgttctcagcatttacgatttcgcagaatctcaagcatttccaaggtgaggaaggcaagtatcggcgtcaagccatcgcgcatgccattgaccgtgagaatatcgccaatgcgattttcggtggcacggtaacgcccgccaccgatttccttgcgccggtgatcaagggatatgacaccgatctcgacacggatggcgtgctcgcatatgatgagacgaaagccgaggaattgtgggcgaaggcggatgcgatttcgccatggagcggcacgttccgcatcgcatacagcgccgatggcaccgataaggagtgggtggaggctgcggccaattccattcgcaacgcgcttggcatcgatgcggaaagctatccgttcgccacgtccaaggaactgcgcagcgccattcaggagcgcaccatcgacgcggcattcaaatcgggcatgcaatccgattatccgcatccggaaggctatctggtgcaggcatacgactcatcggcagcggacggcaagggtttgaacaacggtgattacaagagcgacgaatttgatgcgctgattgaccaggctgctgcggagaccgatttggacaaggccgtgagcctgtatcggcagagcgaacgtgtgttgctgaaggatttgccggtgattcctttgtggtataccaacgtgaccgcggcatcggccaaaaacgtggaagtgagctacaactatatgggcgttcccgaatacaacaccatcgtcaagtaaggtttgttctagcgtgaagactccactgtgagcgcaatttcaccacccgtcgcttcgaagcggtaggctgtgaaactatagagaacataggaaaaggagacaaggtgagcaacctcagtgcacccctgcccgtcatggccggcgaagatatgccggccggacccgccgatccgattttcaaccgtctgctgaaagaccgcatcatttggatgggcgaggaagtcaaggacgaaatggccaatcgcatctgcgcacagatgctgatgctggcagctgaagatccgaagaaggatatttggctgtacatcaattccccgggtggttccatcaccgcaggcatggccatttacgacaccatgcagcttatcgagcctgacgtggcgaccgtcggcttgggcatgtgcgcatccatgggccagttcctgctgagctccggcaccaagggcaagcgattcctgacctcgcatgcccgtgtgctgatgcaccagccgtccggcggcatcggcggcaccgccaccgacgtgcgcatcaacgctgaactgatcatggacatgaagaagaccatgagcgagctgactgccgaacagaccggccataccgttgaggaaatctaccgcgacaacgagtacgaccactggttcaccgcgcaggaagcgctggaatacggttttgtggataagctcgtttccacgcacgacacgatgaatgccaccaagggagagtgaacatggcaagcgaagaatcccgattcgtagcccgcgcagagcgtctcgcaggaccgaccggagtggttggtttccaggctgcagcagcccgcgaagccactttcgcgccgcagaaccgttatgttctgccgcagttcgaagagaagaccccgtacggtttcaaaaggcaggatccgtacacccgcttgttcgaagaccgcattatcttcatgggcgtgcaggtcgacgacacttccgccgacgacattatggctcagctcctggtgctcgaaagccaggatccgaaccgtgatgtgatgatgtacatcaactctccgggcggttccatgacggctatgaccgccatctacgacaccatgcagtacatcaagccggatgtgcagaccgtatgccttggacaggccgcttccgcagccgccattctgctggccgccggagccaagggcaagcgtctgatgctgccgaacgcgcgcgtgctcatccatcagccggccatcgatcagggcttcggcaaggcgacggaaatcgaaatccaagccaaggaaatgctgcgtatgcgtgaatggcttgagaacacgctggccaagcataccggtcgcgatgtggagaagattcgcaaagacatcgaggtcgacaccttcctgaccgcacctgaggccaaggaatacggcattgtcgacgaagtgctggaacaccgtagctgaacggcgcatatgcgaggttccatctgaagtcgcatcttcacaaatcaatacccctgccgggcgttggcaggggtatgctgttcttcaatgatgattgcatgatggcgattgctcaatggcaggtacggcaaacaaaggggtgcgaatgggacgagtggtcagctacaacgatgaagtgtcacgatgcacgttctgcggcaaaaccgaaaatcaggtacgtaagctcgttaccggatcaggtgcggccatttgcgacgaatgcatcgaactgtgcgtcgacatcatttccgaagaacgtgtcaaagacgcccagctgaacacattgcagctgccgaaacccgcacagatcagcgcctatctcgacaactacgtggtcgggcaggaatccgctaaaagaacgctttccgtggccgtatacaaccattacaagcgcgtcaatatggaaatgcgtgaatccgcggcattgcgcgatcgtgcggcgcatgcgagcgacgatccactggccggtgtgcaggtgtccaaatcgaatatcctgctgctggggccgaccggcgtgggcaaaacgtatcttgcgcagacgctggcgaaggtcatgaatgtgccgttcgtcatcgccgacgccaccacactcactgaagcggggtatgtgggcgacgatgtggaaaccgtactgcaacggcttatacaggccgctgacggcgatgtggcgcgagcgcagcagggcatcgtctatattgacgaaatcgacaagatagcgcgtaagagcggcgagaacacgtctattacgcgagatgtgtccggtgagggcgtgcagcaggctctgctgaagattctggaaggtactgtggcatccgtgccggtggagggttcgcgtaagcatcgtgagatggagacggtgcagatcgacactcgtgacattctgtttatctgcggcggcgcgtttgtcgggcttgccgatattgtggcgcagcgtttgggcgctcgtgaaagcggatttggtgccgcgtggcatgatcatgaggtgccgaatcgtgagctgcttgcccaggcttcggccgacgatcttgccgatttcggtttattgcctgaattcatcggtagattgccggtggtgagcgtgcttgaggagcttacggaggatgatttggcgcgcattctggtcgcaccggagaacgcactggtcaagcagtatcagaagttgtttgcgattgacggggtgacgttgacgttcactgagggggcggtgcggcagatcgcggccacttcgattcgcaggggcacgggcgcccgaggccttcgatcgattatcgaaaaaaccttggaggacacgatgttccagctaccaagcgtgactggcgtatcggaggtggtggtggatgaggcgtccgtcaatggttccggcactccgaaactattgaaggtttccacggaggagattcctcgcagacgtgccgcgtagtgcattcggcgtgttgcacgtcgtatgtgcgagagttcagatttcatagggttgaagcaagtatggatgccggtgcgaaatccacgaaaacaggcgcgacacgccgagattttgctgcgcggccatttgggtgtatcttattcgagttgccgaaaacaagcaacgttgcgcgagtagcccagcggattagagcagctgactacggatcagcaggtcgcaggttcgaatcctgtctcgcgcaccggccaccggtcatcaggtggcgtaaataaatgagatggcgttgcgcgagtagcccagcggattagagcagctgactacggatcagcaggtcgcaggttcgaatcctgtctcgcgcacatgaacctccttcgcgaaatgcggaggaggctttctttttttctggaagtaacggcggcgctgccgtgaatagtgttcgagtcaatgcgattcgcaaacctaccagaatgcttatgtaaagcggctgttgtcgagatacgttcggtttctctccgagcgaacggtgtggtacaagaaaagccgccatgccgaataaaaccgtaaacaccagtgaaaaagacggtttgaaaacataaacgccgacacctctcggtacactggaaccgctattgaagcgtctgcgcatgccaataccgcagacgcttttcttaagtgaatggcgggccgtggatactcgcggcaacagacgggagagcaatgaccgaacgtaagcagggactctgggcgaaaatacgatacatagccgcttccgaccgcatatctggtctgattatgcttggcttcgccctcgcaggtctgttgcttgccaatctgccgttcacggcgcatgcgttcgaagagttggagaatttccgcatcgccattccctacaccaatatcgatatgggattgggacactgggtgcaggatggtctgctgacggtgttcttcctgactgtcggactggaattgaaacaggaactcgccacaggttcgctgtcgaaccccaaggctgctgcagtgccgatgctgtgcgctgtgggcggtatgatggctcctccggtgtcgttcctgctggtattgttcctgttctccggtttcggctccgatccgttggccatcgcttcgggaacgagtttcacctttggtgagatgtctcatggttgggcggttcctacggccactgatatcgcgttctctttggctgtgcttgctttgttcgccaaagcgctgccgggctctattcgcgcgttcctgatgacgcttgccacagtggacgatctgctggccattattctgatcgcggtgttcttctcttcggtgaacgcatggtactggttcgtcggcatcgccgtatgcgctgtcgtatggtatttcctggtgcgtatgcgcaaagtgccatggcttgccgtggccattgtcggcattctggcttgggtgatgatgttcgaagctggtgtgcatcctactttggctggcgtgcttgttggattgctcacgccggctcatgagcgtttcggagagaaaaccccacgcgccgaacgctatgcggacaagctgcagccgttttccgcgttgctggctctgccgattttcgccttgttcgccactggtgtgcattttgaatcgttgacgttggccctgttcatttcgccggtcgtcgttgccgttatggtggctctggtggtcggcaagccgttgggcattatgatcacggcatggctttccacgcatgtggccggattgaaaatggctaagggattgcgtgtgcgcgacatgttccccgcggcctgcgcatgtggcatcggctttaccgtatctttcctgatttcctcgcttgcatatcaggatgccgaactgtctgctgaagcacgtttcggtgtgttggtcggttccatagtcgcggcggtgatttccggcattctgctgagccgccaatccaagaagtttgagcttgccgctgccgcatcctcgaagcataagcatcatactgctgacgaggatgctgctggggaagtggaatctgttctcgaagacggcaccgttgtggtcagccagatgatcgacacacatccaaaggtcaaataacgacgttccggcgtatggcattccgcgccatacgccagacacaacaaaagccgacactcatcacttatccgtgagtgtcggctttttgtatgaggaaacggtaggccgctgggaacggccatactagcgtttgactgctacgagcaggcccgtaccggtcggggtgagggcagtgacgaaacgctcatcggattccacggtttccagcaaaccacgcatggcaatggatttggcgtcacgattggcgggattcaaaacgccgcctgcggacgtggctgaatcaaaagcaagaatatcggtgaacacgattacgccatgcttcttcaacaggcggggagcctgctcgaaggaagcgccgtaattttccgcgtcgccggcaactacaatcaaatcgtagttttctgcattcagacgtggcaaaaacacgtcgacgggagcgttgacggcgcgaagcgtggtctgtgtctcgtcggaaagccgattaaacaacgtacgaatcagcgcaatgccctgggaagaggaatcaaccgccgtaagctgaccggaattatccaaaccgttgaccagctgcaacgtttccaccacggaaccggtgccgacggcgatcaccgatgtcgcattcaccatatgcacgagcatgcgcaacagctcggcttgggctgctgaaccctgcggaatgcctgcttcttcagcatgggtgcgaatagcattcaagtcggttgactggcgggagaacgcatggtcctcaacgtattcccatgacttggcgagattggtatatgacgttctatccatgggttcagcgttccttgacttgggcgatcagctgccagatttcctcgccgacgtcaatgccacgcgggcattcgcgggtacatgcgcggaccgactggcatgcggcgatgccatcggcggaatcaatggcatccatgcgtgcgttcgcctgaccgtcgcgggaatcgttgatgaaacgagacgccgcgataagggctgcaggtccgatgaacgcttcgccgcccgcatacacagggcagctgccttcgcaagtgccacaggcgatgcagttgctgagaagctcatacttggcaagctgctggggattctgcagatattcgaaagcgttgatcttgccgtccgcagtggtggcgagttctccatgcgcctgcagatagggcttgagttttctgatttggttgagcatctgatcgatatcggcaatcaaatcgcgctgcaccgggaaacccggcaggggagcgagctcgatgacgccaagatcccctgcgccgaccgcattttcctgaatgtcggaaacatctccggtgtgtcggaatccttcatcgtcgaccaatgtcggattcgacggtttggcccaatccttgacggacgcggtgcacagcagggtgggggtgccgttgatggacaccgcatcggaaccgcacatgccatgtccgcacgaatagcggaatgccagcgtcggatcgatggtgcgtttgatcttcaacaggcaatcaagcaccgtgtcttccggacgcacgttcaacgtgtaatcctgcaaccactgcttgccgcgcgggcggcggcgcgccgacatgccggaatccccaaacggagagctttttctggcgaacggagagccgccacgttcgcggtcgcgggcacgctcggcgcgcggggcaaacctattcacccgcaatgtcaccgtattcacgccgttttccataccgctcatgtacccgcctttccagtaaaaccgtcaactagtctgccatacgccgtgcccagcggaatcagtattcgcgggcttttggcggcatattcacaatgtgcaccggctgccaggaaatctggccggaggcattcaccatggaatgggccaggaaatgctcatcgtcgcgttccggaaaatcaagacgcttcagcgagccacgggattcgtgacgcgcatcggatgaggtgagtacggccttgccgagttccagaaggtggcggacctcccaaatggcggtgatctcctggttgaacgtgggggagtcggaatgcgcgtgcagggcttcggcacggggcgcaaactcatcatgcaatgccgttagcgcctgttcgataccctgctcgtcgcaacgcacggcgacagcgcgttccatgacggtacccagatcggccatcagctggtaaggattgtcggctgcatgctcctcgtcttccggaagctgcaccagcagatccttgagttcgttggaacgggtgtcagcggcctgctggaccgcatccgaaccattgtcggcgtcggattcagccatgggatcgttcactggagcgctggaaatgcgttccgccagcgccttgccggagcgggtgccgaacaggcatgcatccagcagggaattgccgccgagacggtttgcgccgtgcacggacacgcatgcgcattcgccggcagcgaacaggccttcgacgacatttcgttcgtcgttctgccaacggtagacttcgccgtcggtggtgatcggaatgccacccatggtgtaatgcgcggtaggcttaaccggcacgaaatcgtgtgtcggatcaagatccgcatatttttcgatggtttccaccacctgcggcagtacctcatgcatatggtcggcatcaataccggtcatatcaagccacacgcaatcctttggcccttcggggtccttcggatccgccacgccgtggccggcatcgatttcagccataatggaacggctcaccacatctcgtgcagccaaatcggcatggccgggagcatacttttccatgaatgcctcgccatcggcattgcgaagcacgccgccttccgctcgtgccgcttcagacagcagaatgccggtatgcgccagaccagtcgggtggaattgcacgaattcgctgtcttcaagctgcagtcccgcttgcagtgcgagagccatgccgtcgccggtcagatcccatgaattggaggtggtgtggaataggcggcctgcgcctccggtggccagaagcacgttgcgtgcgtggatggcgtgcgtttggcccttatgcgtgtcaaatgccactacgccttcgactttggatccgtcttcggtgattaccagatcggtcacgtaccattcctcggcgaattccacgccttcggccacgcattgctgccacaaggagaagaggatctgatggccgatgcggtcggccgcataggcggcgcggcgaaccggttccttgccgaaatccttggtatgtccgccaaaacgtcgttgtgcgatatggccgtcctcagtacgggagaacgccacaccgtcatgttccagatcgattacggtttccgacgcctctttggcgagcagttcggccgcgtcctggtcgacgagccaatcgccgcctttgaccgtgtcgaagtagtgccagtgccagtcgtctttttcgacgttgccgaggctggccgcaatgccgccttccgcggaaccggtgtgcgagcgcaacggctggagtttggagatcaccaggatgttcggctcgatgccggcttccttcagggcttgcatttgttcgcttcgcagcattcccaatgctgcggacaggcctgccgcgcctgcgccgacgattactgcatcatacatatcttcaacatgcttcggactcatagcaacgattttcgcacaaggtgtgacctcattgcggtttgccggttggcgggtttgccgctgcatgcgtggttatgcgtgtctgatgcgtatgttttcgatggattccgttgatctgtgcaggcttggcggtggcgttgttgggcgtgatgtcatgtggcgcttgcgtcggtgatggtgatgttgccatgctgtgtgcagataagtccgttgagttccattaatcccagctccatgctgattcgtgagattgagtattctccgggattgctttcggccaggatggcgagtagaccgtcagtggagacgtggccgtatttcgcgctgcatgttcgtatggctttgagtatggctgcagtggcgttggttggttgcgacagactggtgtcggttgactcttccgacggttcgtcgtcgttgtctgccgcgtcggctgattgcgggcgatgcgctgcgtggcagaattcgtcgatatcggtcagcgagcagatgatggaggcttggccttcttgtatgagtcggttgcatcctgtgttgtgaggcatggttacatctcctggcacggcgaatacacggcggttgagttcgttggcccatcctgcggtgttaagcgcgccggagcgtgcgcgtgcctgggctacgatgagggtggatgatagcgccgctatcaggcggttcctgataaggaatcgtctggcttccggaacggttccggggcagagttccgagatgagcgcgccggaatggttgatgatggtttcgaagaggcgctcgttgcttttcggaccgatatagttgagtcctccggcgaataccgcgacggtgcgtcctgcgaggggcgttccgatctcgtccatggcttggatggctccccagtgggcggccgcatcggtgcccagagcgcctcctgacactatgagatggcctgctcgggccgcttgtttggcgagctcgtgtgcgctttgccttccgtactcgcttacgccgcgtgatccgacgacaccgaccggttcggagcatgacaccaacgcttgggggtcacctttcccccataggcataatggcgcggcccagtccgtgtgtatggtgaggtcggcaagctgcgaaggccagtaggggtgatgcggtgcgacgatccactgcgtgccgtttgcggtgaaccacgttttgagctcctcggggtcggtgctgggcaatgtggtcaggcgatgctgccacgagaccattgcgccgtggaaggaggccatacctcgagcattgatggtgcgtccccaacgtgtaatgccgttgatgagcgccgcgtccaaggttttataggctgccgtggccacgctttcatgattgcccggaccgctgtcggcaagcagttgcagggtatgcgtggctgatccgatgcctttgaccagcgcgtacatcatcgcatcggcgctgtccagacaataggtgagcaccgcgcgtgacagggtctcatcgtcgatggcggttgcgttgacgctcgtatcggcggttgtgttctcgttcatgtcaacctcgttctcatggagattccttgcatcatctcttccggtccgggagaggttttgcctgacaggtcggatagcgtccatgcgagtcgcatggctcggtccgcccctctgaggctgagccgttcgctggccaacgcatggttcacgagctcgatggcttttgtggacgtgttggcgcgaagccatgttccggtggcttgcgcattgcagacccatccgaattcccggaaacgttcctgtgccgtttgccttgccaccatgacccgcaggcggatggcgtggctggattcgccggaaggaaccgtgcctgggttgatgcgttccacaggaggcacttcgatctgaatgtcgatgcggtcgaggatcggccccgacaggcggctgaagtacttgatacggtctttttccctgcacgtgcagcgctcgccgttgccgtatgcgtagccgcaggggcaaggattggccgccatgatcagttggaatcgtgccggatagtaggtggtgcctttcgcgcgggatatcgccacatacccggattccaatggttcgcgcaaggtttgcagggtgcgtgccgagaattcgggcgcctcgtccatgaataggatgccccgatgcgcccgcgtgatcgcgcctggttgagccaatcccgtgccgccgccgaccaaggatgcggtggatgcggtatggtgcggcgcttcgaatggcggaacatcgctgatgccatagctgggcaatgtgccgcatagggagcggatcgatgcgacttccagttgttccgattcgctgagcggactcataatgccgggaatgcgcgaggcgagcatggtttttccggtgccgggaggaccggtcatcatcagatgatggccgccggcagccgccacttccaacgcccatttggccgtttcctgccccatgacttcgttcatatctccgggaggaggacataccgacatggcgccgtcgttggcatccacgtctcggatcatatcgggtatcgtatagttcgcggtgcctcccatcagttcgatcagttcgccgacgtgacgtattccaatggcgtcgacgtcgggcacaagggccgcctcgtccaaattggcatgcggtacgatcaccttgcatacgccttgatcgcgtgcatgcagcagaatcggcagcagaccgttgatgggcagtaccgtgccatcgagattcacctctccgagcacgacggtgtcgttcaagcagtcatgcggtatcgttccggatgcgctaagcacgctcgctgcgatcgccagatcgtgtgaggatccgcgtttgggcatggacgccggcgaaagattgaccgtaacccgtgtttccggccatttggcaccgctggcctgacatgcggatttgacacgttccctcgcttcggagagcgaggtgtcgggaagtccgatgatggaaaagtaggggagtcccggagatacgaacgcctggatttggatgatgaaggctttcaggccgatgagacccacggaaagcgcgctgccgatagccatcagaacgctccttcgatatggtggacaagcggtttgccatcacggacgatgacggtgacgacgtcgaagcgcacgccgttatgcggcgtgcgatggtcgctgtccgacagccattgcacggccgcgtggcgcaggttgatctgcttggatgacgtcacggcttcctgcggagtgccatagcggagcgtccgcctggttttgacttcgacgaagacgatgattcccgtatcgtcgcgtgaaacgatatcgagttcgccatatcggcagtgccagttgcggtcgagcgtctgccagccttggctttccagccatgcggccgcatactgttcgccgagttcgccgacctgtcgtgcgcacagtgtgccatcatgcagtcgccgtgcgatggaatcaagaagctgttccgagcgctgcgttgcgttcggaacgttatgtgttgtgttgccgttcatgattcaagtccagcagaaaggaccggcgcgaagcaagggcgaacggcgaatgtggatagaggatgcggtttcgggcgtgtttgggatagttggtggataacttgccgttatccacattgctccacaaggcgagcggccatggagcgcccgaaaccgcatatggttggaatgttcagcggcgaaccagacgcgtcaactcgtcaaggttcagctcgaagctcacaccgcgctcagtgtggttcggctggaattgcgtgctttccatggcatggcgtacgaattcgccggcgatatgcgccgattcagccagaggtctgccggccatcaccgcaccgcataatgcggatgcgaaggcgtcgccggtgccatgtgtcatgaacggcagcttgtcgtgcgcaatctcttgcttgccggatgcgccggaagtggccgatgccacatagttgcgaatgatgccatcctgacggtcaacgcctttgagcaccacgtttttcgctcccaaggcaagcagcgcgtcaataatgccgttcacttccgcgttgtcgatgttctgccccgggtaggtgcgtcccgtcagcatggacgcttccgtcaaattcggcatcagcacgtcggcgccatccaccagcgtgcccatcgcctcgcataattccggcgtgtatgtggcgtagatctcgccgccgtctcccatcaccggatccaccaaacgcaaggcgtgcgggtaatccgcatacagacgtttgataatcgcgacttgttcggcggaaccgaggaaaccggaatacacgccgtccaaatcgacgttctccttgcgccacgcatccagatagccgtccaaaatttcggtcgtatcgtggaacgtgaacacgctgtagcgcgtatgcgccgaaaacagcgccgtcggcacggggcatacgtcgcatccggccgccgacagaatcggaatggccgccgtcagcgagcacttgccgtaaccgcacatgtcgtgcaccgcggccacacgtggaatgtaccgtgggtcacggtcgaacagaatcacatcattcatgggaaccctctcttgcgattgcctgaccatgactttagccgcttgcctgacttcaccgccccatcgcctcgtacggcgagtcaccatgatgccgtttgctggcgtgtcgcaagttttttgatggctaccagagtagttttgcaaagcctggatggcaatgattgcaacggtttataaggggatataggcaagtgcgataacgctcggtttgcattgcgaagcgacgtcggattattgtcgctaccaacacctgaccaaccgccacacacggcaaggcgggtggtcagcaagacaagcaacgaaccacttccccacaaggagcagaaaccatggcagattccaagaactaccgcttcgaaaccctgcagcttcacgtcggccaggatcaggccgacccggcaaccgattcccgcgcggtgccgatctaccagaccaccagctacgtgttccataactttgatcacgccgaggcgcgttttggtctggccgatccgggcaacatctacggccgcctgaccaattccacccagggcgtgttcgaagaccgcatcgcagcccttgaaggtggcgccgctggtttggcagtcgcttccggcgccgccgcggtcgaatacgccgtgcgcaacatcacccagtccggcgaccacatcgtggctgccaagaacatctacggcggcaccttcaacctgctgcgccacaccctgccgcgtgacggcatcaccaccaccttcgtctccgctgagaacccgcaggagttcgaggatgccatccaggagaacaccaagctcgtctacttcgagaccttcggcaacccgaacgccgacctgccggatttcgaagccatcaccgccatcgcacacaagcatcatctgccggtgatcgtcgacaacactttcgccaccccgtacctgttccgcccgctggagcacggtgctgacgtcgtggtcgaatccgccaccaagttcatcggtggccacggcaccacccttggcggcgtgattgtggaaggcggcaacttcaactgggccgaagtgccgggcaagttcccgaccctgaccgagccggatccgtcgtaccacggtctgaacttctacgaggctctgggcggttccgcgttcgtgacccgcatccgcgccatcctgctgcgcgacaccggcgcaaccctgtctccgttctcggccttcttgctgctgcagggcaccgaaaccctgtcgcttcgcgtcgagcgccatgtcgagaacgcgctgaaggtcatcgactacctgaagaccgttccggaagtcgaatccatctcccacccgtccatcgaaggccgcaaggacaacgagctgtacaagaagtacttcccgaacggcggcggctccatcttcaccttcgacatcaagggcggcaaggacgcggcacgcgtgttcatcgacaacctgcacctgttcagcctgttggccaacgtggccgacgccaagagcctcgtgattcacccggcctccaccacgcactctcaggagacgccggaggagcttgaggaccagggcatccaccagggcacgatccgtctgtccatcggcaccgagaacatcgaagacatcctcgacgatctcaagggcggtttcgcggctctgcgcgaatccggtctcgccaagtgaggcgtatcggatcggcggaataacgccatcctgagcaaatgaaacggtttgtggcaccgaagagaaggttggtgccacaaaccgtttcgccatattcgcggacgttgtcatcgtaatgtagcgcagatggtatagaatctgcgattgttacgaaaagtaatatctaaattctatcttttgaaagaaagaagttcagatttctttcaaaaagataaatagtggtaatgatattgcggattacgtaaagagagaagagagaggcgattatggctcaagaagtcaagaacgatatcaaaaaggcgttgcaggtcaacaccattccgctgatcgccattatgaccgcggtcaccacggtgctgaccatgctcgtgaagatcccgaccccgatccgtggctacctcaacctgtccgacaccatgatctatttcagcgcgtatgcgttcggaccatgggtgggcggcattatcggcggtcttggcccggcgttgagcgatctgatttccggttatccgcagtgggtcatcttcacgttcgtcatcgatggcctgcaggccgtgctcgtgggcctgctcgtcaagaagttcaatccggcgaacatcatcatcggttcggtgatcgcaggcgtatggaaggtgttcggctatttcatcgcaggcggaatcctttccggatttggcccggcgttgggtgagatcgcgggcaactccttccagatggcggtgggtctgattgtgggcttcgcgctgttcaccgccgttcgtcaggcctatccgccgctggtacgtttgggcaacctcggtattaaggcgggggagtgatacattaatatcatgtgaaggcaggcccgtggatttgccgatgaaaggcgattccacgggttttattgtgaaatgcggttaccggctgcggaaaaaatgcgtgaaagcacggggtgagcgtcatgattacggttcgcgacttaggatggaagtacgcgccactgaccgacgggagcaagccggtggaaagtctcaagcgcgtcagcttcgacatccggtccggatccttcgtcggcatcatcggaccgaccggagcgggcaagtccacgctatgcatggcattggccggcatcattccgaacctggccgacggcaccatgagcggcgtcgtggaagttaacggcatgaatacgagcaggcactccgtctcggcactgtcggagcgcgtcggctacgtgcaacaggatccggaagcgcagctgttctgctcgagtgtcgaggatgagatcgctttcccgctggaaaaccgcggagtagccccaaacatcatcgacaagcagatcgacatcatgctcgacttagtcggcatggccggataccgcaagcgtgtgccgaccagcctgtcgggaggccagatgcagcgcgtggccatcgccgccgcgctcgcggcggaacccgatgtgcttattcttgacgaacccaccgcggccctcgaccccgaaggcaagcaggaagtgttcgacgtgctcgaccgcattcgccagacccgttccatgacggtgatcatggccgaacaggataccgaacacatcgcctactgggccgatcaggtgctcttcatggtcaacggtgaagtggtgcgcaatggagacgccagcctatttacccgggaacgtagactgttggaatcctccggcgtgcgggtgagtgacggaccatctcccgtcatcaaggcgttgccggtagggaacgacgccaagccgaagcatgcgatcatcagtctggaccatgtgacgcaccgctatgggcagggcggcaatgcgtctcccgcactggacgacgtcagcttggatatcgaacagggcgccttcgtagggcttattgggcgcaacgggtcaggcaaaaccacgctcgccaagcacctgaacgggctgattcaacccacgcaaggaatcgtgaatgtggatgggctcgacgtgtcgaagcatagcgtgggcgaaatggccgcgcacgtcggattcgtattccaaaatcccgaccatcagattttctgctccagcaccaaaaaggagatcgcgttcggcccgaccgcgctcggacttgacgcggccaccgtgtttaaacgtgtcgacgaaatgatgacattgttcgacctgcaccggtatgaggatgtttcgccggccacgctcggctacggcgaacgacgtgcggtggcattgtcttcggtgatcgccatgcgtacgccaatactcgtcctcgacgaacctacggcgggtctcgaccatcgtctcgcatcacgattccttggaaccgtggaaaaactcaaccggcatggcgtcaccgtcatcatgatcagccatgacatgcgtgccgtatatcggtattgcacgcacgtgctcgaattggaagacggtcatatcgtgcaatatggaccgatcgacaaatcgcaggaagcgcaacaatcgcccgcgcgacaggcgcggcagccgtacaagtcgcgcggtccggtatcggcgacccacgtattgttgaaaatcgccaaggatgaatgcgacaaggaggaacgctgatggatgccgacctgtatgtgccaggcgacggatggttgcatcgcaccgatccgcgcgtcaaattcctcatctccatcgtcatgctggccctttgcctcgtatggcgtaactgggcgttcatcctcggcatcctcattctcgaacatgtgatgctcgccaccgaccgtgtgcccgccgaacgcattggatgggtgtggaagatcctcgccgtgctcatcgtgttcatcgtggtgctttggccggtcttcgaccagagtggaacgcacgtgctctggcagtggggatggttgcgtctcacgcaggagaacctgctcatggcggcggtgatgggtctgcgcattccagcgctcggctttgcatgtttcatcacgctgttcaccaccagccagaccaaactggttcgtggccttacctcgcttggtatgccctacaaggccgggcttaccctggcaaccgcattacggtatattcccgtgttcttttccatcttccaatccgtgtccgaagcgcagcgtgcgcgagggcttgatctgagcggcaaagtcaatgcggcaggtaaaaaacgcaacatattcgtacgtctcgtagaccggttcaaatcgtatctgccgatcatcatcgccgtattgatccgcgcctacaaaatgagccaaagcgtgggctgggccatggaatcgcgcggactcaacctgaatcggaacggtgtgaaacgcacatatcgggtcaatctcacgatgagcattgccgactggattattctcgtgattgccatcgccgccgccgcaggcagcgtgtggttgatgacatggctgtcatagggggtgcaatgacacaggatgaagggcgtaccacaatcaccgcacgtgatttgaaggtggtatcggcactgcaatgcaacggacgcatgaccatgcaggcgcttgccgataaaatcggcatttccgtatatgcggcgacggaaagctacaaacggctcaccgatgcgggcatcatgaccattgtgcccgtatgcaatccgttgagtctcggcaattacagtcaggtgcttgtgggactgcgtatcaacggcaatcgcaacgaggcgctcgccatgctcaaagccatgcctcaggtcacctatgtggtctgcacgctgggcgatgccgacatcatcgccgaagccgtggtgtattcagccgacggtatggaccatttcctgaagtacgatttgcgcgcactgcccggattgacccgtctgcaagtgttctcctgcggtcgattggtgcttgacgaccataatgtcagcgtggtcaaccgtctgctggccgaacgcggcgaaactggattcatgaccaaacgtgaggccagcgtcggcaccgatattcccgtgcatcggttggacgcgcgattcgtgcacacgttcaacgaattgcagaaagacggcagggcaagttacgccatgctgggggagcatcttggtgtgacgcacaccgcgattcgtgggcgcgtcaaaaaactggaggattccggtgtgatgcgcattatggccacggtaagccccatgcgtttaggcggattccgccaagcgtttctcggcatcggtgtgaagcctccgtatcgcctcgacgtcgaacagttgttagcgatcgacgaggtgacatatgcaatgagcggagtcggtttgaatggcgccgactacctcatcgaaatcatcgccggagatgacgaggacctgtggcgtgtggtggatgagtccatccgttcgctgccaggcgtggaccagacatggtgggcttccaccgtcagcgtggaaaaagagtcgtactggctcgaacctccgcaggatggtgtacttctcgacgattgatgaatcaatggtattaggcgcctcatctttgctcattctcaaggatgagatgataattcagaccaacgcatgatattcgaatcagctgtttttccgtaattttggaggtaatccaaagaaaggaatgacagcatggatatcagggacaccatcaaagctaccaatacggccattgcaaccgtggatcttgtgaaggactacggttccggaaataacacggtgcatgcgttgcgtggcgtcaacgtcgcttttgaaaaaggaaaattcacggcgattatgggaccttccggttccggcaaatccacgttgatgcacacgttggcaggactggattgtgcaaccggcgggcacatcatattcaatggcgacgatctgacgcgcatgaacgacaaccagcttacgttgctgcgccgccgcgacatcggattcatcttccaaagcttcaacctgctgccgatgttcaccgccgaacagaacattctcatgccattgaccttggctggagcgaaacccgaccgacagtggttgcgtctgctggtggaaacgcttggccttaaggaacgtctcaaccatcgtccgaacgaactatcgggaggccagcagcagcgtgttgccattgcgcgagcattgatcaccaaaccgaaactggtgttcgcagacgagcccaccggcaatcttgattccgtatcaagcgccgaagtgctgagcttcctgaaacgttccgtcaacgaacttggccaaaccatcatcatggtcacgcatgatgcggtcgccgcgtcttacgccgaccgtgcgctcgtgttcgccgacggccagatcgtggcggacgtaaacaagccgacagcagaccagatgagtgaactgctgatgaaggaacgtgaggccgccacaatgaatgtggcttccgcgagacattcccgctaaacgcactatagaagcattcgaagaagggaacagaatccaccatgtggtccatcactttgaaactcatgcgaaaaaccaagcgcatgctcatacccgcaggcatcgccatcatgatcggcacggcgttcatcgccagcaccttcctgttcggcaatgccatgaacgactccctgacacggcagctgaccgccatgttcggaaacgccaactatgcggtgaccgtcaacagctccgacctgagcgataaggaactcaacgaggcgtattccagcactgtcggcgactttcatctcgaccagatcgccggcatcgaaggggttggcggcgtccgtgcctcggtggaaaccggcgtcagcgtttccaagggagacagcaccgtcagcggcgagatcatttccaccgcggcacagaagaacatgctccccgtgaatatcacggaaggggaccagccgaaggattccaacgaagtcgcgctgccggaagacatggcgaaacagttgaacgtcggcgttggagacactgtaagcctgacctcccgatatgcggtaggcgacgatggcaaagccaaggcggacaacgtgcgcgtggtaggactcacgtccgatccgaacggcgcctactcatactatggtggtgcgatcgtaggatccaacaatctgcttgccgcaatgcagggagtggacgatttcaacgccaccggaacaacaatggtgtatctcgaccttgccttggatggaaacagcgtatccgcaaaaaccatcaacggtgtgaaagcgttgctgccaaagcatttcgatctgatgtcacgacagcaaatcagtgacgaaagcatcaaatccttaagcggcaaccaaaccaacatcgtcaccacattccttatgtgcttcggcgtgcttgccatgttcgtggcggctctggtgatcgccaacacgttccaagtgctcgtggcgcaacgccgccgcacactcgccttgctacgcaccatcggcgcaaagaaaggccaactgtatggttccgtgctgttcgaagcggtggtgctcggcttcgtcgcatccgtgcttggcgtggtgcttggaagcctgctcatgtggggcatgtgcgtcagcgacatcatgcaagagggtatgcgattcaatttctcttggcaggccgccgtcgtacctattctcttcggtattgtggtgacggtgctcgcatccttgggatccgcacgttccgctactgcggtgacgccattggaggcattgcgcccgattgaactgaccgacaaccgtcgttccagcctcacgcgagccataatcggtattctgatggtggtggtcggtatcgccatggcagtattttccatctggcaggtacaagccaccaatggcggcgaggaggcgaacagcgatcaattcacgatgattctgctcatagccatcgccggcgccgcactggtgttcctcggcatggtggtcaccgcggtgttttggatgccgaccctcatgaagggcgttggagcgttggcctcgctgacaggaccttccgcaacggttgcgcacgccaacattcagaagaatccgcgacgcatcgcagcaaccggtgccgctctgctcatcggtgtcaccctggtttccaccatcgcaaccggtgccgctagcgccaaagagactatgaatggtgcgctcgccacccgttatagcgtcgacatcgtggccatgggcgatgacatcagccagcaaatggccaaggatgtagccgacatcaacggcgtgtccgacacgttgtatgcgccggcggtttccgtgaccttggagaaagcggatggaacccggcctacgtccgcattgctggtcggtgtgaagagcatcgatcaggtcaagcgggtcatgcgtgccaacttgggtaacgcctccatcgacagtgatagcgttctcatgccaacatacaatgcgcaaactggcaaggagctgcagttcgccaatggcacggctgatttctccaccgaatggaaccgggacggcgacgctacgcgttcgctgacattgcaagcaaaccaagctgactaccgtcgcgtatccgcacagtatgaagctgtcggattcgtggatgaaagccatttcaccaatggtgaccttgatgccgccacccatgtgttgctggtcaaagcagatactgacaagtcgggagtttccgtcgacggcatctacaacgacatgcaggccgcattggaaaagagcactgatgcgacagtgaccggaccgatcgccgaacgcatcgtatgggcgaacatgatcgactccatgatgatgcttctggtgggattgatcgccgtggccgtgctcatcgcacttgtcggcgtagccaacacgctgtcgctatcagtgatcgaacgcacccgagaatccgccacactgcgtgccatcggcatgactcgaggccagttgcgacactccctcgcggtggaagccctgctcatctcgctggtatccggcatcgcgggcgtactacttggcaccctgttcggctggctgggcgcatacgtggtgttcagtatgtacggcaaagtggtgttcccgttcgaatggggcattaacggcatcgtactcgccgtggcagccgtggcagcattgctcgccagcgtattccccgcacgcagggcagtgagcacgcctcctgttgaggcgctcgccgaagcctaagcttcatagcaaacacaacgaaaaggactcctgccacaaacatggtaggagccctttttgcgtatcatgcatacgcaaaacaacaaatcaatcagaccaaatggttttcgtaagcgaacaccaccgcctgcacacggtcacgcgcattgatcttcgccagaatatgcgccacatgcgttttcaccgtcggcaggctgatgaaaagcttgtcggcaatctcctgattcgacaatccatgcgcgatctcaataagcacttcgcgctcacgatcagtcagttcatctaattccggatcggtgtacgtcgaatcagaagtggaagaagcagtggaatttccatgtgcgccaacattcgcagccatgaaatcgccttccatcattttctcgataagacgtttcgtggcggacggtgcgataatcgcattaccttgaaaaaccgtgcgaatcgaattcaacaacgtttccggttccgtatctttcagcagaaaaccggaagctccggcagtgatcgcagccataacatattcatccaaatcgaatgtcgtcaaaataatcactttggtacgggcgacttctgattgcgttccatcggcagcgaagcgatgctgcaatgcactgatctgccaagtcgcctcgataccatccatgccgggcatacgcacatccatcaacaccacgtcaggatgcagcgtttccgccaacgccaaggcttccgcgccatcgcgagcctgtgccgcgaccgccatatcaggttgggagccgatcaccatggcgaaaccggcacgtaccaattcctgatcatcggcaatgaccacacgaatcttctgttcttcactcatactctccaccttatcggcattgttccgctcacagcgcgaaacaaacccttaaatctccctgaaaaacttgaatcggctatcgagacacgcgctgcagctgctcctccagcggtgctgcaggcctcaactgcagttcgctcgcgctaccggcatgagcgtcatcgctgaaaccagtctcacgaagcacaccaagcagttcgcgcatacgcttaagtgcggcgcgcccctgttctccaatggctttgaacgctgcggaaatctcgtcggcggtaggctctttgccttgtgcttcggcgctatccagcatgcggataccatcgacggcttgactaatcacgctgttcaacgtggcggtgacttcagcctgaatgctggcactgatacggtcacgttccatattcgccgcgagaatacgctgcttctcctgctcggccaccagcgcttcctctcgcgcctgcaacaccagtgcgtttgaatcactggaacgagcccaacgtgcccacgccataatgccggcgcacagcatcagcactgcagccgtatacataacgccggtaaagaacgccgccgtattacttgaagtgactgaaaccggtttcgtcaagcctgcaaaagcggcgatggcgccgaacaaggtagtgtatccgtgttgatcagccgcgattttcaagcccatcagcaccgaacaggtagcggcggcaagaccggtccaacgccatgcgtgttcacgcccatacaatacggctgaatacagcgaacacagcgacgctacgatatgtccaacctcaatcgatcccaaaaacaccaattgcacaaccgacaatacgaacacaataagcgcgcaagtctcggggaacctgcgtcgaagagccagcgccagcaagcagcatgcggcgatcgcatgagagagctgcgcctgaggtgaactagcaaaaaagagcgtaaccgacatgcgattcagcagcatgaccaatgccacggcaccaacggaatccatgagcgcataatggtgctgcgtccacgcggaaactcgttccacccaattcagccctcgcgaattggatgtatttgcaagttctacggatttcagtttcaacgatgtgagcaaatcatgcagattgggtgcggtgatgcgaaaatgttgcagggcattcgaacgatgatcgcgaccggtcggttggttggtttcctgcgtttgctccgatggctgatctgggattcgcgccgatatgttgacgactgtgtgaggtgcgattgtttcgtcggataattccgctttgctggatatggcagttgtgttgcacgattcgggctgttccgaggcatactgttcgccggtttcgtctgtcacctgttctttaccgccgtaaggcagggtggccatgacttcgaagcctccgccgagttgagggccagcctgcaacgagcctccggccgattcgatgcgttctttcatgcccagcaggccgtaacctggcgtatgcccgtcgatattggccgccgcgccatgaccattgtcggtgatggtcaaagtgagcaaaccgttgttccataactctttaatatgcacatcgacgtgcggccccgcatacttgcggatatttgtcagcgcctcctgcactacatggtaggaagctatcgaggcttgttcgccgagttgttctgggctggcggtgccagtgatattccgtcggattcgaatgtcgggggagacgttttgcgcttgttccacaagattgccgatatcgttataatcggcgtgcggtgaacccccgaatactcccagaagacgttgcatgtcatgcagtgcgcgttccgattcgtgtcgaatcgtctccatggtgtttctggccaccgcgggatcatgcgtgcctgcatagcgaccgccatcagactgcacgatgatgattgacagggtgtgcgccaccacatcgtgcatgtcacgtgcgatgcgtgcgcgttccgccaacgcggcgatatcgcgttcattctggtctcgcgcggcgattgcctcattgcgttctcgcatcatgcgaatggttgtcagacgggcacgctgccagaacgctacaatgacggtggaaataatgcatacttcgaaaatcggcgtcagtaccagcatgtactgcgccatcatgtcggcgacttccgacatggatgttcctgtgtagacggagccgagagtgtcttccgtgaccataacgccatttggatttgggtcattccagctgctccatgtatgcactttgcctccggtgagcagtggtccattggtcatggtccatgccaccagcgccgaagccagaagaccgatggtcaacgccagaataatgaaggctttcgtgtttttgggattgccgtagacgatcactgaatacagcatgaacaatgccagaatatcggcgcccaacaggcaagggccgaatatgagatgcgtcaaggtcaatgccacgcagagcaacgctccggtctgcggccaccatcgacggattagcagcggaataagcattgccgcttcccatgccatctgcgtggaaggcttaaggtcaaacagcaatcccggattataggtgatgctgccggtcacgccgaacagcagaacacctataacaagcgtgatgatgagatcgccggcgaaaacatggccatgcatccatgacaagagacgctgcttgagattcgacatacgttccaccctagcgccagatatgctgtgacgccatcatgcgcaggaatgaaatagcggtaagataaagccgcttttgtgaggtaaggttgtctccgcatgtgggtgagatggaagccatcaaaaagtcactacccgcattaaacatgccgatgatgccaagggaaaggtgaatgcatgacgttgctgagcgaatactacgtgcccggattgcatattgaggatcgttccatcaaagtgccgttggattggacgggccacgagcctggtcatgggttcgatggcgaatcgatcagcctgttctaccgtgtggtcacctctcccgaacatgtgcatgacgacctgccgctgctcgtgttcctgcagggtggtcccggtggttccggtccgcgtccgctcggtccaagttccgatggttggatcgaggaggccatcaagcatttccgcgtggtgttgccggatcaacgtggtacggggcgttcgtctcgtgtcgatacgcatgtgattgagggcatggatggcgacggcaaggcaggtgccgcgtttttgaagcgtttcctcgccgattcgatcgttcgtgatttcgagcatctgcgtcgtaccgaattcgggggcgcacgttgggtcacgcttggtcaaagctatggcggattcctgacgctgacgtatctttcgctgtttccgcaaggagttatcgccagtttcaccacgggtggcattccgcatgttcccgccgatgcgaccgacgtgtaccgtcatacgttcccacgcatggtggcaaagacgaagcagttctacgagcgttacccgatcgatatcgaacgtgccgcggccgtcgccgacattctgcagtcgcgcaaggtcgcattgccgaacggcgatccgctcacggtggaacgtttccaatgcttgggatccgatttcggcatgaagccaagtttcgaacgcgtgcattggattcttgaccaggcattccttgacggcgacggttcggcctcaacctcggcggaactgtctgacgaattcctgtcttccgtgatgaatgcgacttcgtctcgcccgctgtattggccgttgcaggagttcatctacgccaacggtgagctggaaacgccgatttgctgggccgcccagcgcgtgcgcggcgagcatccggaattcgcgggtgacattcgtccgcttaatttcaccggcgaggccatgttcccgtggatgttcgagcaggaacgtgcgttgcgtccgttcaaaccagccatggacgtgcttatggaagacacgcatttcggcacaatctacgatgctgaccagttggcgcgcaatgaggttccgctgcaggctgccgtctattttgacgacatgtacgtagattctggattgcagctcgacacgctgtctcgcatcggtcgttcacattattggactaccaatgagtttgaacatgacggcgtgcatggtgcaacagtgttcaggcacctgttcaatgaagcattaaaccgcggagatttggcggagttgttctgacgatcgttcagcaacgacgagcatcgatagcaaaggaaagaaacatggccaatccaaccatcggattcatcggatacggcaatatggcgcaggcgatcgccgaaggcctggtcaatgccggcacaatcagcggcaacgacattgtggcttgtgcggcacactatgacaagctggaacgtaacgccgccaaacttggtgcgaaagcggtgcataccgctgcacaagtggccgaagctgccgacgtggtcgttatcgccatcaaaccgtatcagattgaagcggtgatctcaccgatcgttgacaagctggcgcagccaaataccatcgtcgtgtccattgcggcaggctgggatctgaacaaattccatgacctgttcggaacgtctttcgaacaggcgcatattcaatgcaccattccgaacacgccgatggctgtcggcaaaggcgtgctggtcacggaaatcgacaacacgctcacgcaggaacagacggaaaccttcgaaaacctgttttcgtcaatcagcctgatcgaacgcgtggacaccgcacacatgggcatcggcatgtgtattgccggctgtgcgccggccttcaccgacatgtacatcgaagcattgggcgatgccggtgtgaaatatggattgcagcgtgccaccgcgtatcgtctggccgccaaaatggtggaaggcgtgggtgcgctctatttggccgacgaaacgcatccgggtgccatgaaagacgctgtctgctctccaggaggcaccaccatcaaaggtgtcgcatcgttggaggaaagcgcgttccgtggtgccgtgatcaaagcggtcgacgccatcgaagcctaatactaaactaaggaaccatgtctcttactatcggaatcgtcggactgccgaacgtcggcaagtccaccatgttcaacgcattgacccgtaacaatgttctggcggaaaactatccgttcgctaccatcgaaccgaacaccggcatcgtgccgctgccggatggccgtctgccggtgctcgccaagctcgtgcacacggagaagatcgtgccggccaccgtcaccttcgtcgacatcgcaggcatcgtcaagggcgcttcggaaggcgaaggcctgggcaacaagttcctcgccaacattcgcgaagccgacgcgatctgcgaggtcgtgcgtgccttcgaagacgatgatatcgtgcacgtcaacggcaaagtcgatccgtccgacgacattgaaaccatcaacaccgagctgatcctcgccgatctgcagaccatcgagaacgcgctgccgaagttggagaaggatttgcgcggcaagaagatcgaaccggcctacatggaggccgtcaagcaggcgaagaccattcttgaagccggcgaaaccattgataaggcggctcgcgaaggtcgtttcgacaaggattccgtctacgatctgcacttgatgagcgccaagccgttcatctatgtgttcaacgtggacgatgccgagctgcagaacaaagacatgcaggccaagctcgccgcatccgtggctccggctccggccattttcctcaacgcgcagtttgaagccgacctgaccgagctcgacgaggctgacgctcgcgagatgcttgcggacgccggtcttgaggagtccggattggatcagttggcgcgagtcggctacgatacgctcggcctttccaccttcctcaccgcaggcgagaaggaagttcgcgcatggcagatccacaagggctataccgcgccgcaggctgccggcgtgattcatacggacttcgaaaaaggcttcatcaaggccgacatcgtctcctacgacgatttcgtggctgccgaaggctccatggtcaagatcaaggaggaaggcaagctacgccaggaaggccgcgactacgtgatgcaggacggcgatatcgtcgaatttaaattcaacgtctcgaagtaagtgtttctctggctcccctctttgaggggagctgtcgctacaagcgactgaggagcggcacggataaggcctgagaagtcgtcttctcaggcctttgtcatgacattgttctgcaaggactggctgctgcagcagcataatgtgtgttttattattcggccttggcggcttgctggtcaatccaattgttgacgtcggtgaccgcctcgtcaagggttgctttggcggctttgcagtatttggaatctacaggttgacgatttccgcgccgaacggccagagcgcaagcttggccatcttgaatgattgcaatccgaacggaataccgataatggtgatgcagttgagcacgccggctcccagatagccgagcgccatccatcagccgaccagcaccacccacaggatgttgccgagaactcgcatgatttgcccctttccgattccggtcgatgcctcgcatgttcagcttcactattttgccagacagcatgacggaaacacgagacgcaaccctgagatcgcccctgattcattctctgaccgctattcaggcggatcgtatgcggtaagcccaatccttttgtgaagattttgtgtattgtcgggcatacgtggttttcaccgtcgatttgaatgatgataggcttctcgatgtctgccgtatgaagacccatcaaggagatgccatgaacctgtatcgctacgcgatgttcatcgcacgcgcctgccgtgggtcgttcgtcggcaatgttctgtttgccaatccacaaatggccctattctcgatgctggtgtagcggggacacgtcttatgccgggatgtaccgatggcccatccgcagtcgacgtcgcatgaatcgctcaccatagccatcaacttacgcaaagccgcgaatcgtttgccgtatatgaatgcggaacggatggcggcttttcctttaccccggactcatcagtgtccccgcgtcttgacacaagtatggggccggatcgctcatacatgccgttaccaacagaaggaaatgctgtgacctcacagaagaccgcggaattcgggtccgccgccagttccgtaaagcctattgattcgcacgcccgattcatcgtcgtgggcgtgatcgtcgtcggctcgttcatcgcgctgctcaaccagaccgtcatgtcaccggccttgccggcactgatgcgtgatttcaatatcaccaccggcaccgtgcagtgggtgaccagcgtctacatgctggtctcgggcatcatggtgccgatttcaggctatctgattgataaattctccacccgaaagctcttcgctggagctcttgccactttcatggtcggcacactgctgtgtgccgtcgcgccgaatttcatgctgttgctcgtcggacgcatactgcaatccgccggctccggcgtgctgttgccattggtcgccgtagtgccgatgctcgtctatccgccggataagcgtggcaccgccatgggcatggccggtatcgtcatggccgccggcccggctatcggcccggttgtcggtggtctggtgattgacagtttcggatggcgcccgatgttcattggcatcgcagttgtggcactggtcatccttgtcggaggcacgatgatgctcaagaacgtcggcgagttgaagaacccaaagctcaacatcctgtccgtgatcctttcgaccatcgcgttcggtggcctgctctatggcttctcgtctgcttccacgatgggatgggccaatccggtcgtcattatttcaatcgtcgttggtcttgtggccttcgtcgcattcgtatacaagcaagtcaagctcgatgagccattgttgcgcgttgacacccttgccacccgcaacttccgcaactccgcgattctggtcactctgattaacgccgcagtcgccgcaaccaacgtgacgttgcctatcttcatccagaatgtactcggccaatccgccaccgtcaccggcatggtcatgctgcccgccgcggcggtcggcatcatcctgagtccggtcgccggtgccgcattcgacaaattcggcccgcgcggcgtgggcatcggcggccttgcgctcatgaccatctctcttggtcttctcggcaccatcaacaccaggacatcagtgctgtttgtcgccgtgttctgcgcattgcaggcatctggtcaggctatcgccaacatgccgatcaacacttggggcgtcaacgctttgccgaacgacatgatcgcccatggcaacgccatcgccaacaccggccgccagatcgcggcagccattgcgacctcgcttctggtcaccgcagaaacatccgtgaccgcctcgcacatgtcccagggtgtgaagtccgccacggccagcggcatcgcgttctcctacctgctgtgcgccgttatctcgctggtcgccctgatcatctgcatcttcaccgtcaccagccgtgccaaggagaaggccgcacgcaacgccaaggcctacgaggcgcaagcctccgccgaagtcgcggtcgaaaccactgaaggccagcccgccgagcatcactacgccggcgcatacgtggcccccgccgcctccctgttcaagcaggcccaggaacagtccatcggcgggatcatggacgatcagccctacagctgcctggacagcgatgacatcacgcatgtggtgcgcgagttcatccgcctcaacgtctccagccttcccgtggtgaacggcgatggcaggctcgttggcttcgtcagcgacggcgatgtcctgaaatcgattgccacctatgaatcccgtacggttcccaccggcaccggttcgacgatggtggtgttcgacgacgaaaccgtggcctccaaggtgcaggcgctctccggtaagaaggtgatggacatcgccacgcgtaaggtcgttgctgccacgcccgaccagcatgttggagaggtggcccgaatcctcgccaagaagcagttcaagaaactgccggtggtggatggtgatggcagactcgtcggtgtgatccgccgtaagtccgtgatggaacatgccttcgacgcgctgttcccaaaggatgatcggtgattcggcgtcatcatcgctgaatagaatgaatgaaatatgaggcttcccttctcgcgggggaagcctcattgctttgtccgcggagtcttacggcacctgcgcaagggcaacgtcacgccttcatgatgcattattgaatagtgtgttcctatcgttgtatggtgacgctaacgcatggcgtcacgataccgaagcctgccatctaacggcggatacggctcgttgctggagtcgtgcacgcatacgcgcgtcggcgtgcgtgggatgtccattcaggtttttcccatcttcggactcgtaaaataggtgaggttaacaagacgaagaacgatgacatccgtcgattcgcaaggggtggacgcatatggattatcagtatcaggccgttgaacagccttccaatccccgcaaaacctggccgattgtcctttccgtggtcgtggcgctcactgtggcatgcggcgcaggagtgtacgtctaccacaacaaacggcaggaggcgttggacacatgccggcaatcgcttgcggaattcagctcggcccgtaaggccgtgctcgacacatccgaaaacggtagcgagctgcagaaattgatccgtggtgcgctcggcgtgaacgacatcatcgacgcgttcgcggacgccgccaccagcgcagagaacacggtcgatacggaaggctgtaaggcggacgccaccatcacgcagctcaatctcatcgccaaaacactagacagcgccacggactccctgaataacagcctgaaggacatccgggagaagaacggcacgaatgcgctgcaggattcgcggaacgattcggatggcacgacaacgaacggaccatcctccaatactcagtccaatacgtcatcggggcaattgctcgacgttccttcgaacggttcttccgccacggaatcgttggatgaatcgaagaaggaactgcagcagtcgctcgacaaggcggacaaattggtcaacaagcttggcaaggacgaaacactgacattgactggccgtaaactgctgtccgcattgtccaaagctgtggattccggtcaaaaactcattgaaaacagcaatatcaaggattccaagtactacaaggcagccaaagtcacgctcgatgaggccatcgatgtggccgagaattgggtggacagacaggcgtccaaagcgcaatgacgattctccctcgtgttgcttccatacgcgcgtctaaagtttcccggaaaaacgtcgacgattatgacatcagagaatatgacgccatgacggatggaagcgtaagagggggtacgaatggcgaaatcggggtgtgggccgtcgggaaacatcgcgtttgcgaacccggtcgcccgtccatatcctagacgatcgggttcgcaagaccgattagaagaacagcgctgagactccggccgcaaagcacataagcagcacagacgtgatgaaactggcgaggaacgccttctgtccctttttggcgatggcgctgaaattcacgttgatgccaagcgcggccatggccatgccgagcacgatgtacgcgaaatcgaccagattcggtgcgatggcaccgatgaacggcacgaacgtgccgatgatggaagcgccgatgaaaccgagcatgaaccatgggagcgacactttgcgtttaccgtccgctggcatttcggaatggtttttatcccaccaaacggcgatgacgatggctgcgaacaccagcatcagcactcgcgacagtttcatgatggttgcgatgtccaccgcgccgaacgcgtcgccggccgccacggcatgagcgatttcgtgcaaggaagctccggcggtaatgcccagctgtgtcttactcaaaccggtcaatggtccaagggcgatttccagtaacgcgaagatggtgcccatgatggcgacgatggccacggccatcacttcgttgtcggctttttcatcctctttttccggcggtactttgatggagccagacaatcccatgacggcggccgcaccgcaaatgccggtgccacccgccaccagaatggcgagttgcgggttgacgccaagtttgcgggcgatggcgtagcacaccacgatggtgagtgtcacgaccacggccgcgatgggcagacacttgatgccttgggtgaacaatacggtcagattgagcttgaatccgagcagaatgattcccagacgcaacagtttattggaaataagtcctgctgcgtccttcacgccggacctgtgttccacggaacggctggaataccatttgcgaatcggaaactgggccgccatgccgatgagcattgcgatgatcagcgcgccgaacagactgaatcccggaaactgtttaagccacgaagccactagtgaggcggccaaagtgacgatgccgacgaaaaccatttccttggtagctatgcgagcccaccatgttttgcaaaaaccaatcacgtgtctcaagtgttccagccggttcggacatcggtatggtgcggaaagcgatgacttcagcgccgtgccaacgatactgaaatccaatgcgcgatcggcagcaggtacaggaacactgccaatgtcagactggacgtgggcgctcccaccgaagcgagcggcaccgctccggcgatggaccatggaatcagcggagccaccaccacggcggtatcctccagattgatggccttgcgatgctcgtcggactccagatggtcgcatagctgatttgtcagcatgatcgacaatgtttgattgcaggcgacggcactcgccacgagagacgttaccagcgtggcgccgaatacgctgatatgccgggcaagtgatgcgaccatccgatgcgcgccatccagcagttccgtctcttggaaaatgccggaatatgacgatgaaatgcatacgatcagcatcactttgaccattgaaacgattccgccaccatcgatcagcggtgcgacgcgcgcgtcagcacagtggaatccgaataccagtgcgtggccaatcgcggtccaatccatatgttgcactgcaacgcaaatcggcaatgcagtcagtatgctggcggtcatggtgatgcgcacgtcaaccctggcgatcgccagcgcgaccaacaccactgcgggcaggacggtgacccaatcaagatcgaacgcgttggaaaacagtccggcaatgtcaatggagccgttggaaggatgcgtgcacagcgccaatgccgcatacactgcgcacgtcagcacgaacggtaccgcggcggttttcaacatcagttggatattgtcgaaaatgttcgtgcgcgtcagcgttttgaccaattgggcgctggtggatacgggggagcagcggtcgccgaaatagatgccggacagtatcgctccaccgaggaacaccggtggaacctgcatggaagtgcccaacgtcatcgtgatcacacccatcgtcgcggccgaaacgaacgatgatccggtcagcagtgacatgaggcagttgagcaggaaggcgagcagaatcaccacatgcgggcgcaccaggctggaagtgttcgccacaatgaacggcacggtgccggcggcgcgccatagcgtggtcagcaggccaatcagcacgaacgtcaccaccacaatgcttgcggcacgcatggtggcgaaccctttggaaagcatggtcgcgaatttgtgaccggtgattttgccatggatgaggaacatgaccacgccggccagcagtgcgggaacgatggatatgttggttatgatgcaggcaatcaaagccgcacagaacagcgccatcgtaacaagttccgccatgatgttcctttctttgacgattatcgcgcggtacgtcaacgccttcgacattcttttgacgaatcgtaagaactcggcaagcgtagcagtcattatgtaaacgcgatgagttcgggctaagacgtggacatggtcttgtgctggtgcggtggaatggctggtgcggtgggagtgtcggtttggttcaaccggacttgagattgatagtctgtaatcggttatgctgaagcgagcagaatcgaggaggattatgactgatttcgatattgcgaaagcgcaggaattggaacatcgtacagatgatgcgtcggctcccgaggtgttcttcactcccgtgattacgccagaaagtctggttgccgcatatcatgcgttgggagctaggccggaaggtaaggtcgccatcaaaatccattccggagaatccgaaaaatccaataatctgaatcccgcgctggtcagggatttggtacaggagatcggcggaacattggtggaatgcgcaacggcatacgacggcaatcgagagactcccgaaaaaagccttgccgtgttcaaggaacgtggatacgacgacatcgctccgatccagatcatggacatgggcggcgagatcgagattccggtagccaagcaccgccatatcgcctatgacatcgtcggcaggcatatcgacgactatgattccatcttcgtgctttcgcatttcaaagggcatccaatgggcggtttcggaggcgcgttgaagaacgtgtccatcggcatcgcatcgtcgaacggcaaacgttggattcattccgcaggcgtggctaaagacaagtgggtcgaagctgagcaggatgactttctcgagtcgatggccgaagcggatgaggctgtgatcagccacatgaacggcaagatgatgtatttgaacgtcatgaaccgtttgtcggtggattgcgactgcttcgccacgccgtccgagccggacatgcatgacattggcgtgctttcgtcgttcgacccggtggcacttgaccaagcgtgtgtcgatctgattcatgtggcgccggacggcgcgtccgtgaccgagcgtatcgccaccaggcatggcgagcacacgctcgaatacgccgaagagcttgggcttggttcgcgtgcataccgtttgaccgtgctcgagtagtgtgcacggagtcggcgatgatggaatccaaggaatctaaggaatccatggaaaacgtggaggaggcgcaggcggttcaagacgcgcgggccgtgatcgaacgcatcgaacgtgtgtttacggaacgcgagcatgtgtttgtggcgatcgacgggccatgcgcgtcgggcaaaaccacgttggcgtctttgctgcagcgtcgtttcgacggcaatgtgctgcatatggacgattttttcctgcgcccggaacaacgcactccggaacggttcgccgaaccgggaggcaatgtcgatcgggaacgattcgaagaagaggtgctggctccgctcgttgccggaaatatcgtgcagtatcgtccttgggattgccataccggcgattttgcggcttcgcatagtgtcgaacctgctcgtttgacgattgtcgaaggcagttatagcatgcatcccgcattgcgtgaatactacgatttgatgatctgcctgatgattgattccaatgagcagttacgcagactcgaggcacgtaatccgcgtatgctgcagcgattcatcgacgagtggattcctttggagaatcggtattttgagcaaactggaacacgcgcaattgccaacatggttgtagatactgccaaatcaaacgaataacgaatcatacataacgaatttttcataatgaacgaaagcttgtgaaaagaaagcttttaaaaaggagaatgaacatgacttccactacagcagtttccttgcgtcgcactgatctgccacgcttgagcgtgagcgtcaaagccgccgcaaccgtgcttgccattgtcgccgcagtggcgttgccgcagttgttccatgtgatcggagcggtttccggacgaggaactgcgttgggcgttgcctttctgcctatgcacttgccgattattttcgtcggtttgatcgcaggtccagcggttggtgcgattgcaggcgcagctgctccactggcgagcttcctgctttccggcatgccgatgctggctgttctgccgttcatgatgattgaattgtgcgcgtacggtttggttgcaggtctgctgcgtgagatcaagctgccaagcctagtaaaggtggttatcgcccaacttgccggccgtgtcgtactgaccgtagccactgcagtggcggtgttcgcattcggttccggcaacagcatcgccgccacttggacgagtgacttggccgctggactgcccggtcttgctttgcagtgggcgctgatcccgctcgccgcctactggaccgagtcgctgattgccaagcgcaatcactgaacaacgatagttcaaacgcggcagtcagccacgttctgaacaaaaccgatattttcgggagtcaagccattacgcttggctcccgttgtcatatcagtcgggaaatcgggagaaacggtcatgatcgcgggagtgtccatcaccacattgctgctggtgctcgcagccggcatcggggcgggattcgttggatacgcggtcggcgcatcctcgctgatatcctatccggcgttgctggcgttcggcattccgcctgtgctgtccaacaccacgaacacggtgggcgtgtgcggtacgggcatcggcggactgctttccgcccgcagggagctcagaggccaaggcgtgcgcgtggccgtctacgcctgcatcggattggtcggtggcatcatcggcgggctgttgctgctggaactgccggcagaagtgttcgaatgcgcggtgccgccgctgatcctgttcagcgcgatcatcatcgcactcaatccacggaagaaggcggccgcgcgcgacgccgtggcgcaggcgctgccgcaatcgcatcaaggcgaacgagccgcgcggatcgccagcaaaaccgcaagcggcacgttgcgcaacgatccgtggtggctgtgggtcggcgtgagtttcgtcggcgtctattccggctatttcggtgccgcagcaggcacgcttgccttggcgattctcgacttgggtaagatcggtccgttccatcagattaatgcgttgaaaacggtggtcggtttcggcgcgaatatttccgccgcaatcatgttcatcattcgtggatccgtgtattggccgttcgccatcataatgtgcatcggatgtatcatcggcagtgccatcgcacctcccgtaacccggcatattcccgaaaacatcatgcgtgccgccgccgtgctcaccggcatcatcctagccgtcaaactcggctggagcacctacttctaggcaaaacagatcggttttgtgagcaatggagatatccttgaaagaaggtagttacaaaatggcaggggagcaatggcggttgtcgatgaggcgaagctggggtatctggactttctttcgcgtgaggatcgggtacgccaccatcgctacgttgaggaaatgaagcagtatgacatgatgcgctccggcgacatcaatgccatttcggaaagcgcgaaactgtgggattccggactatacggccatctgtcggacgattctctgaaaaatgcgaaataccgtttcatcaccaccattaccttggccacgcgtttcgccattgaaggtggcatggacgaggaagacgcctacaacgcctccgatttgtacatccagaatctggaaagctgcaaaacccctgacgacgtgcgccgtctgcataccgacatgatgacattcttcacttgggccatggccgacatgcagaagacggaaacgcattccaaagccgtcaacgaatgcatggactacatccactaccatctgcatgagaaaatcactgtcgcgattctggcacaacgcgtgcatttgaatcccacgtatctgtcggaactgttcaaacgggagacgggcacagcgatatcgcaatatatcaccgacaaacgcatggaagccgccgaaaacatgctgaaatactcggaatacagcttcaatgagatcgcgcagatcctcgcataccggtcgcaaagccatttcacgaaagtcttcaaaaaacatagcggcatgacaccgggggaataccgtgccaagtactcacagaacggcatctggccggagtagtagcgcctcggcgtgtcgagggtgatgcggtgaaccggacgtgacggcatcgcgaacttcgggtgtgccaatcgtgaaatcgacgtggtttcgcgtgtggcatacgttcaaatcgactacggtggaagcattcaatgatgatgcgcgccggccgaatgaacggcagaacgagaaacgcgcgcaggatgtggatgaaagcaaaggaataagcgaatatgggaatgccccttgatttgtatgtgattcgacatggcgaatccgaagcaaacgtgattatcagtgccggtgaacagggtgacaactcgctgtatacgcaggataacgtcaccgtgcccgaccgttcgtggaggcttacggccaccggccgcaagcaggcggactgcatcggccgctggctggtctcacagcagccgttgttcgaccgttacctcgtctcgccgtacgtgcgcacgcgtgagacggctgccacgatggccctgcctaaggcgaaatgggaggagacacgcgtgctgcgcgaacgctcctggggtgagatcaataccatcacgaaagatgatttcaaaaccaattacgcgcgcaactggatgttcaagaacactgatccgctgtattggcgtccgccggcgggcgaatcgatcgccgatgtggccgaaaaccgcgtgcataatctgctcacgtccctgaaccgcaagtcggacgcggaatccgtggtgatggtcagtcacggcgacctcatgctggcgcttatgctcactttggaggacttgtccgacgaggaattcatgcaccgtgcggcgtccgacgaatggaagatcactaattgtacgtgcttccattattcgcgtcgcgatccggccaccgggcgtactcacaagcgtttccgttgggaacagaccgcccgtccggtgttcgacggtgcggaaggtcgttgggtggtgaaggtcgaagattggcgtgaattcaagcgtccagtgctgtcgaatggcgatttggtggacgttgttcatgcggttgaccgtcacctgtgatgtgtgtcggtctgttgactgcatgatcggattggccgatatcgacgattgatgcccccatcttgcgtacgaaacgcgcccgtgtccacgccccactacaatggctatgacacgcggcgcgtttttgcttgccgcgcaagagagttaaggagacaatcgcatgtccaatctgttcacgtggcaggtccacggtgacggcaagacgctgaagccgggcgaagtcgttgagcctgacgagcgcctgacttggccgcgcaccgccgaaatcggtgcgcagcacgtcatcgccatgttcggtgccacgttcctggtgccgattctgactggtttcgacccgtccaccaccctgttctttacggccatgtcgaccgcactgttcctgctgatcaacaagaacgtgctgccgagctacttgggttcgtccttcggcttcattgccccgatcaccgctgtcaccacggcgaacaagggcatcgccgtcgcatccttcggcattctcgtcactggtttgctgctggctctgatcggtgtactcgtgcacttcgcgggtgccaagtggatcgacatcatcatgccgccggttgtcaacggtgccattgtggccatcatcggcttcaatctggctccgagcgtgtggaacaacttcaaggtcgctcccgacaccgccatcgtcaccctcgtggccgtgctgctcgtcgccgtgttgttcaggggtctgctcggccgactcaacatcctcatcggcgtgatcatcggctatgcgtacgcctgcttccgtggccaggtcgacttctccgccatcggcaaggccgcatggatcggcctgccggaattccgtctgccgcaggtcgacttcaccatcctgccgatgttcatcccagtcgtgctcgtgctcatcgccgaaaacgtcggccacgtcaagtccgtgtcccagatgaccggccgcgattatgacgaccagatcggcaccgccctgttcgccgacggtcttggtactaccatcgccggtttcggcggcggttccggcaccaccacgtacggtgagaacatcggtgtgatggcagccaccaaggtctactcgaccgccgcatactggtgcgccgccgcgttcgcgctgattctgagcctgtgcccgaagttcggtgccatcatcaacaccattcctgctggcgtgctcggtggcgtgaccaccctgctgtacggcatgatcggcatggtcggcatccgtatttgggttgagaacaaggtcaacttcgacaagccgctgaacatcatggttgccgcaatcaccatgatcatcgccatcggccagttcgcgttcgctttcaatggcatttccttcaacggcatcgccatcggcaccatcgtggtcctcgtcgcctaccacggcctgaaggccatcggcaaggctaccggcaccattgccaaggacgatccggacgttctgtgacggacggcaatcagccgtatcggacccgtcggtcttatggccggcgggttctttttgtacgtgtttccatacaaacgttccaacatatttcgtcaatcgatcaatgtgttgcgttgagcaggttttatgatggtgcgtgtaagtgaatgtgcatgcggcaagggaggcatgatgagcactgcagcaggaaagaaaatcgctatcgtcaccggttccgcgcttggattgggatacgagctggctcgacagttgatcgccaaaggatggttcgttgctggtattgatttcaatggcgcacgccaggcggagttgtcgaagacttttgctgccgacgaatacagagcttttgtgggcgatatttccgacgaatcgttcgtgaagaactctgttgccgcaatctcgaaaatcggtcatatcgatttgctgatcaacaatgccggtcagccttcgttcaaagtcccgaccgcatacgaggcggccgatgtggacaagtgtctgaaaggtctgaaaggcatggtgttgtggagcgtggaaacactgaaagcggacggtgagcagaatctcaaaatcgccaacgtcatgtctactgcggcaacgcgaggcaaccccaacgaatccgtgtactgcgccaccaagtggggcgagaagggctacaccaagagtttgcaggccgcatacaaggggaccagtgtgaaaatcgtgggtgtctatccgggtggcatcgacaccccgttctaccgtgacagccatgactacgtttcagaagaaaagcagcataccttcatgcgtgcggatcagctggccgaagtgattctgttcaatctggtcaacaaagcgaatctgaccgtcaccgatatcgaaatcaaccgcaatccggcgtgaatataacggatatgaaggattgaaggaacgtaagcaaaagtattgggcataggctacagttatcaggtttgcgcaacgtgcgtaatatttgacatgaaaggccattgtgcccgataccgtttttgatgaagataccctcgcagccgcttccgaagcgatgggcgaggaagaggaacgtccgttgacgttcgccgaacttggcgttcctggtccgctggtccgcgtgcttgcggccgatgacaagaaaaccgctttcccgattcaggctgacacgcttcccgattcgttggctgggcgagacattcttggccgtggtcgcactggatccggcaagacgctggcattttcgattccgctggtcgctcgcttgggcgaagtggatgccggcgagtatgagaacatgagccagttccgccacgaggtcaatcgtgtgaagcaggcccatgccgaggaacgtcgtgccgacgatttcgtgccgcatccacgtggtctggtgcttgctccgacccgtgagctcgccaaccagatcaacgatgtactcatgccgctcgcccagatctacggcatcaacaccaccaccgtgtacggcggtgtgcgttatgcccgccagatccgtgaccttcaggccggtgccgatattgtggtggcctgcccgggtcgtcttgaggatttgatcgaacagggcgcgctcaccttggacaaggttgaggtcgcggttattgatgaggccgacgaaatggccgatatgggcttcctcccgccagtcaagcgactgctcggccagatttcgttcgacgcgcagatcatgctgttctccgccacgctcgaccatggcgtggacgaagtggtggaaaccttcctgtctgatccgaaggtgcatagcgtcgattccgcgacggcgaccgttgacgagatgacccaccatgtgttcaaaaccacgcagggcaaccgtcacgagctggtgcgcaccctcgcttccggcaagggtcgtcgcattctgttcacccgtaccaaattccagacgcagaagcttgccaaggatttaacgcagaacggcattcctgcggccgaattgcacggcaatctgagccagaaccagcgtgaccgcaatctggccgccttcaactccggcgatgtgaacgttatggtggccaccgatgtggccgcgcgaggcatcgacgtttccggtgtggaactcgtggtgcaggtcgaaccgccggaagatccgaaatccttcctgcatcgttccggacgaaccgcgcgagccggccattccggtgacgtggtgaccatcattctgccgaaccagcgccgcaggacccgtcgcatgatgcgtgaggccggactgacggtcgaaccgatcgatgtgacccctgattcgccggaagtgttggaactcgtaggcgaagtggccgagccggtgttcggctggacgcttgagcagtcgcagccggcaggaaatccgcgccgtaggaagaacggcaaggggagtgccgacggcgaacgttccggcagatcgaaccgttccggcgggcgtaacaaggatcgcggcaaagacaagggcggtaagccgtttaagtccgaacgtaaggatcgtcgcgatcgcgaccagcgtgaggagcgtaacgacagcgcgaagaagttcgagccgaagaagaaccgtgcggaacgccgtgccgccaagttcgaaggtcgtgacaatcgtgaattcgaagcgcgtgaacatcgttgggaacatcctgaaattcaagaggaacgccgcgaacagcacgaggaaaagcgcaacagcaagcgtcgtgaaaagtatgcgcgcctgcatgagcagcagcgcagcgacaacgagcagcgcgaaacgacgaacaagcgtaggaacgacggcgattacggcaataccgacaatcgcaggaaactgggaaagaagaagtccggacagcttgcgaaaaagcagggtgcgccaagcaagaagcagcgcaagtctgaagcccgtgccgaacgtcagtatgacgataatcgtcggtccaaaggcaagaagcatgacgaacgttcctcggatgcgaaacgctatgaccgtcatacggaagtcaagcgtggcggccgtggcgaacgtcacgacaagcatgcagggcagtcacgccatcgccatgcgaacatcaggaaagcgccattccgcacgcgttgatcgctgaaaagcaaaatcaaagctcgcgtagctggtaaacaatagaaaacggtgtccgccatggtatatgaacacttggcgaacgccgttttctgttaaatctgattgtctattaattgcttggctatatgaaaagttgttcagcctgcgatcggattgtattgatcgtctgcagtgaagcacttacggtatgccatcaccataatgagactgtcggccagaagcgttaacgcggcgatggcggcgagaatcaggaactggtatttcgccgcgtcgataggattgccgccggcgatgatctgaccggccatcatgccaggcaccgtcacaatgccgctggaagccagcgaggcggtagtcggcagcaaacccaaacgaatcgacgagacgatggacgggcgtgcggcctcccaagcggtcgcgcccaacgccagcagcgtatccacttcgtcacggcgttccttcatgctttcgaagaaccggctcaacccaaccgccaaagcggacacggtattgccgagcagcatgccggtcaacggtaccaccaattgcggcacataccatggttgcgggcgaatgatcaattcggtgaccaacgaaatcataatgagcatggtgatgaccaagctcaaaaacacgggaccggccaagcctttcggcacacctttggcacgagacagggtgatttgcacggccgcgatcagcatgaacatcaccagcaacagcaccagccatggattgttcgacttgatgacgaactccataatgaaacccatggcgcacaattgcagcaacgcacggcacgccgaccatagcagtgtcttgccaatgcccatgcgcatcgcttcggaaatgcctgcggccacggcgaccataaccaatgcgataagcagaccccaaatatcaatggaataataattgccgctcatgcctgcactccttgcaccgaatcggactgtgccgcgaaatcattggaatcattggttgctgcggtgtgcggagcattcgcactctgcaatacgccattggccagtgtgagaatgcgcgtggcacgcccatccggcgggcgatggcgaatacgaatcaccgccatgccccgctctgcggcctgagccatgatggatgccgccttatcggcgttctcatcatccaaaccggcatcaacctcatcggcaagcagcactttcggcgaagtaagcaaggtgcgcgccaaactcacacgggcggcctggcctccagacaagtcatgcggagcacgccccaaatcaatatccgcgcagccaatggcgtcaagcgtggctcgaatgcgagcattcggcagtagatctgtgggtttgagagacttaccggccgaccatttcctgccgaatccttgcttgccttcgcccgcacggatagccaatgtgaacggtaaacgaatcgcctcggccacactcgaaccgatcaataccggcttctgcggcaaatacgccacctgactacgccactgctgcggtgtgaattcgctggcagggcgcccttcaagctgaaaattgccgttcgcattcggattcaatcgtgcgaaagcggtaagcagactactcttgcccgatccggaagggccgaccaaatccacaatctcaccatgcttgacatcaacggataatccgctgaaaatcgtgcgttgttcaccgtcgaccggcacgacacaggaaacattcgacgccgaaaaaacatactgcataatgcaacaccataccgcttggctgccggtcggatgcattggacgcgtttcgtagtgtcttcttagctggaatcacattgcatgggaatattgcgtctgctgtacaaggaacatgtacagggaacatgcgcaaggaagcgcgatcggaggaaaccgtgccgcagtcagagtatcaaaccgatccggcatgactgatgcttcccaatgcgctgttggtcgaaggcgatcccgacgtggggtccgttccatgcgtatggcgggtattggaacgtgcgttcaaggtatgatcgatgatcggcaaaggtaagacgctgcctaagagcatcatccattcagcttgctcacagtatttttcgtcgatattccaaggaaaatcagcctcaaggatgaggtcgtgccaacgtttcatggactacaactggcacattggacatgaagaatatgaaagcaagaagtgagcatgcgtgcatggttgatgaacataagtttggtggatggctggtttccggcaacgttgttttcagtaaccgcagtgctggcggcgatactgctgggtactgcaatatgggagacggttgccggaagtcgtgacggtggcaaacgcacgtttgccgtagtcgtgtgtccggtagtgattgcgattattgcaggcattgccggattggtgattgcatggctgctgtcggacgtgtttgtggtgttcggtgttgagctggggccgcatgtggtcgcatgggccggttgcggttgcgcgatcattggattcgcgatttgctatgcggtgcagcataggggagtgttgcgtgccgtcgccgttgtattgacggtattcgcggtgctttccgccgccaccggcatcgatcaggcgtatggagaatatgccaccatcggatcactgttcggccaagacacctatcgtgaagccgacctgacgggaatggcgaaacgcagcgatttgattagcgtcacgcaatggaagcaggaaaaagcagacggtagcgtcagcaatattcccgcacatggcgaagtcaggaaagtaaatattccagccacagcatcgcatttcgaagcgcgaaaggcgctggtatatctgccgcctgcagcgcttgccacagccaaacacaagccggcgttgccggtcatactgatgatgagcggccagccgggctctccgggtcgcgtgtttgccgcgggcggcattcaaaccatgatgaacgattacgcgcagcatcatggcggactcgcacccattgttattgcggccgaccagttgggagacgattcgcataacaccctatgcgtggattcgccggtgtacggcaatgcgttgacctacttgacgaaagacgtggtcgactgggtgaaagccaatcttccggcggcacagcaagcgcaggactgggcgatcgcaggtttttcacagggggccacatgttcgctgcagatcggtgcgaaccatccggatttgttcggtaccatcattcccaccggcagcgagctcaaaccgaccaatggcagtgaaagcagtatgatcagccggttcttccacggcgatcgcaccgcatacgagaagcagatccccatcaacgccattcgcaaccatgcaccttcgaaccagacgcttgttatcggcgcaggggagcgtgatcgcgagtccgtgcgcaatgtcgaacgcatcgcaccggttgctcaacaggcgggcatgcatgttacggcagtcgaatcgcttgacaatgcgcatgactggcatgccgtgcaagacacgttgcggtacggacttgccgtattcggctacaacacgggactgagcgatgccgagccgaaattggtcgactatccgaatctcaaacgcatttcaatctgaatcatcgaacggaagtactgtattatgacgcaatcgcaggaatcaacagtgaaaccattatttggctttcgtgcgcttatggccgatcttgccgactggattcgtgagcatcgcatgaccttggggtttgtgctgttcatcacgctgttcaatgtcggcatgcagctcgtatgcggcattagacatacgcaatttccgccgcaattgtcgcgcgtgagttttgacgcgctcgcgcatgggcgctggtataccgcgccgatttcactgctgtcggtgcctcagttgggtcgtctgctgatcgacattccactgatactcatcgcattcggcttatgcgaaacggtgattggaaaggcgaagacggcatgggtgtcgctgatcaccacgcttggcggcatagcgctcggtatgggattatgctcgctgttcgcaggcaaaagtccgcaatggcatgcgatttcgcatgatggtgcgattttggggccgctggttgttgtggtgggcacgctgatgtgtgccagcgcgttcaccgccatgctgtggcgtcggcgtattcgtgtgatcggctatagcgtggtgctgatcctgttcctgtatcgtggtgaagccggcgattactgtttgctggcgtcggcgttgcttggccatgtgcttggctatttgatggcttccgagagtcaaggtgatgtgtataggcatggtgccttgtatgagatgcgcaggctgattggtatggctgccggcgtgcaggcggtcggttcgctggttgccgtttcttcaagacaatcattcggattgctctccatgttcggcttgctgaccggttccacggaattcgacacgaaacaagtgttggattgcctcaacggttcctcgcatgccaactgtttcgcgcaatatcgtatgatgcgattcaccatgcccggaaactggctggtgtcgttgatgccgacgctgatgctgctgttgatcgcatggggtctgtatcgcggacgccgcattgccgccgtgttaagtgtgctgttcaatgcgtgcacggtggtacttgcgatgctgttttatgtggtgcttccgctgcaatatgttggcgattcgcaggctgatacgttgcctgcgttggctcgtcatggtgcgtttcacgcgatgttttccactatggcattgccgttgatttttatcgttatcgtcattgcgttccgtcagtgttttacgattcgcactagaagtgagattatgttgcgtgctgtggcaggtacattgtcggcttttctgttgttgggattgatgtatgtcgggtatgggcttgcctctcccgaggatttcaacgaaagtccgcaattgattgcattgcttgccgattatgtgcaacgattgttgccgatcggactgctgagtggtatcgaacctgagtttgtacccgtcggccgaatttccttgctggtatatcagtgcgtcggtccggtgttttggattatcgctctgctgtgtgtttgggagtgtttgcgggatcgttccatggtgaatgatgtttcacgtcatcgcgttgatgaaatcattcctcttggcggcgaatccatgtcgttcatgactacttgggaaggcaatgactattggttttccgcaaccggacgttccgcgatcgcctatcgagtgtcttacggcatcgcattgaccgtgaccggaccattcggagatcccagcgaatatgcggatgatctcattgatttcgcaacattctgcgcacggcattcttggacgcccgtgttctacagtgtgcacgaatcgcagcgagccgaactcaccaaagccggatgggattcgcttgacgtcggtacggaaatggtcgtcaatcccaacgaatggcagacccgaggcaagaaatggcaggacgtgcgcaccgccatcaacaaagccaaacgagacggcatcaccgacgtgctcaccactttcaaggaggcacccttctcagtacaaacgcagattcgtgagatctccgcacagtgggccggcaaaaaggccctgccggaaatgggattcaccttgggaggcgtcgacgaactgatcgactcccgggtgcgcctactctacgcggttgacggcaatggcaaagtccttggcgtaaccagctggctgcccacctatcgtgacggtacgatcatcggttggacgcttgacttcatgaggcatcgcaccgacagcgtcaacggcatcatggaattcctgattgcacgcatggctgaacgactacgcgacgaaggcaacgtggaattcatgagcttatcggcggcgccgttggccggtatgggatccaacgaaagcgaacacgaggaaagcgaagtgttgcgtcatgcactgcaaatggtcgcagacatcatggaaccagcatacggattccactcactattccgtttcaaactgaaattccaccccgatgaagagaaagtgtatatctgctatcccgacgcagccaaactgccgcaaatatcgcttgccgtggcacaagcctacgtgccgtcgctcacacctgccgaagccatgcgattcgtacgtacgattgcgccgcgtgattgacatgatgtcagacttgagacggtccatggttctggggtagctcgggtctacactaaagaacggttcataaagtactacttttcctgatggaaggggccagcatgtcagctgaagcaaacgtcggcgtagtcggtcttgccgcaatgggcggtagcctcgcacgtaacctcgcacaccacggcaacaaggtggcagtgttcaaccgctcttacggccgtaccgaaaagctcatgaacgaacacggcaacgaaggcgaattcttcccggcaaaaaccctcgaagagttcgtggacagcctcgtcaagccgcgtaccgccatcatcatggtcaaggcgggagagccgaccgacgccatgatcaacgcgctcgccgacctgatggagccgggcgacatcatcgtcgacgcaggcaacgcctacttcccggacaccattcgccgcgagaaggaaatcagcgctcgcggactgcatttcgtcggatgcggtgtgtccggcggtgaggaaggcgctctgcttggaccttccatgatgccgggtggctccgaagaatcctggaagactctgaagccgatttttgaatccatcgcggccaaggccgaaggcgaaccgtgcgtcacccatatcggtctcaatggtgctggccacttcgtcaagatggtgcacaacggtattgagtactccgacatgcagctcatcgctgaaagctacgatctgatgcgtcgtggccttggcatgactccggctgagatcggtgacgtgttcgaagagtggaacaagaccgaactcgactcctatctgatcgaaatcaccgccgaagtgctgcatcaggccgacaagaagaccggtgagccgctggttgacgtgatcgtcgaccatgctggcatgaagggcaccggcacgtggaccgtgcagaccgcactgtctctggccgtaccggtcaccggcatcgccgaagccgtgttcgcccgtggtctttcctccgaagctgatctacgtgaggaagccgccaagcaggacttcaatggccctgacggcaacctgaacctcaccgacgatgagaagaaggccttcatcgaagacattcgtcaggcactctacgcttccaagatcgtcgcctacgcccagggcttcaacgagattaccactgctgccgaagaatatggctgggatatcgatctggctgccgtggcacgcatctggcgtggcggctgcatcatccgtgcgaagttcctcaaccgtatttccgaagcgttcgaatcaggtgaagccaacgtgtcgctgctgttcgctccgtacttcaagaacgccatcgaaaccgccgaaaagtcttggcgtaacgtggtggctcaggccgccgtcaacggtttgcctactccggcgttcgcttcctcgctgtcgtacttcgacggactgcgttccaagcgcctgcccgccgccctgatccaaggtcagcgcgactatttcggcgctcacacctaccagcgtgtggatcagccgggcgcattccacacgctgtgggctgagccgggccgcgaggaaatcgaagcctgatagacgtatttctgcaacgaatctagcggattaacagatgaaaagagcctcacgctttatgaaaagtgtgcggctctttgtgttgcggcaaatatgatcagccgcaagggaaactcgttgagttgcctcctgaattattcgcgatgctggttgcgtgggttgccgccattcatgattgcggcgacccgtcgcgtcagagcgcgggggagtagtcgttccgctgcggctccggctttggtgaggtagccgtggtaggcaagcgtgcgcccctgcttcatcttccgatacgcgtaggtggcaagctggtaggcggtggccggtttggtcagcgtgaagaaattcatgccatgcatgttcgcggccttggcgaaccctgtggatgtcggtccggggcatacgcaggtcacactcacaccggtatctcgcaattcgtacgacaccgcttccgaaagcgatcgtacgaacgctttcgacgcgaaatatatcgccatatatgggcctgccatcattgaagcaacagaagagatgttcaatatgcgtccgtgaccctgctcgcgcatatcacgaccataacggtacgtaagttcagccaacgcggccatgttgagctgcatcatctcatgctggcgatgccagtcggcgtcgagaaaacccgtccaatccgcaaaaccggcgttattgacgagatgatccacttcaaaaccttgcgaaactgtgtaatcatgcaactgttgcggtgcgtcagactcgcttagatcaagcgcaaccgtctccacatgcacgccatagcgatgttccagcgtgcgcttcacgtcatcaagtttgccttgactgcgtgccgtaatgatgagatcatgcctgtcggccgcaaacaatgccgccatctcacgcccaatgccactcgaagcccccgttatcaacgcatatgccataaaaccacctttcttaagtattgatgctcatggtagtcaatacgcatgcaataacgccatttgcaacgcaatggtccggaacttttcgactgggctggctgattgacagttttcatgcacttctcgcatggaaagtaatacatcatttacattagttattttggtttggttcgttcacaatgggtgcgtcagcatgaatgtgaaagaaccagtatggaatgttcgaaaggccatgtttttgaactcatacaacagggcggcccgaccgacaaagtcattacaatgcatgtcgtgaaaccgggatcattcacagcttgcatttgacttcgtccacttgaagttcttaagtttgatggcatgacttacgatttcgacactcccgtagaccgatccggcacgtattcgctcaagtgggaagaggcaggagatgcgctgcccatgtgggtggcggatatggaatttcaaaccgctccacagattcgagccgcactgcagcagcgtcttgaccacggtattttcggatattccatcgtccctcctgaatggaatcaggcatacgttgactggtggcaccgtaggcataatcttgatatcgacccggaatcgctcgtattcagcaccggcgtggtgccggcaatctccagcatggtacgaaaactcaccacagcaaacgaaaacgtgcttatccaaactccggtctacaacattttcttcaattcgattatcaataatggatgccgcgtgcttgaatcaccgttggaatacgacggttccggacattactccatcaactgggccgatctggaatccaagttggccgatccgcaaaccacgctgatgatcctgtgcaatccacacaatcccgtaggccgaatctgggatcgcgacaccctcgcacgcataggtgagctttgctggaaccatcatgtgaccgtaatcagcgacgaaattcattgtgatcttaccgatccgggatatgattacgtgccctttgcctcggtgaatgagcagtgcgcaatgaactccgtgacctgcatggcaccgaccaaaacgttcaatatcgccggtcttaacacggctgccgtaatgattccaaatcccgtgctgaggcataaggtatggcgtgcgctcaacacggacgaagtggccgaaccgaacgccttcgccatgacggccacgctcgctgccttcaacgagagcgagccttggcttgaggaattgcgcgcatacttggcaggcaacaaagccgaagcacgagccatgatcaacgaatacaatgctgccgcggcaccggaacgacgcatcgccctgattgaaagccatgccacctacttgttgtgggtcgattgttcgaaactgacgcacgataccgctctgttgtgcgaacatctcaagcgcaatcatcaggtgatgttctccgaaggtgccgagtatggcggcaacgggcatgatttcattcgcatcaacgtggcctgcccgcgaagcaccatgcaagaaggattcaatcgtctgttcgccggattacgtgattttcggtgaattaatataagaccatcggctgtgatattgctcacagccgctaggaaacggctggttttgtgggttttcacaaaatatggaaaggacgtttttcggatgggcaccgccgtccgtgacctgttggcgatactatgaggcatatgactgaaactgtttcatccgtacttggcacgcctgaagagtggacgaatccgctgcgcgatccgcgcgatcttcgacttccacgtattgcaggcccgtgcagtattgtgattttcggcgtgaccggcgatctgtcacgcaagaagctgcttcccgccatttatgatctggctaatcgtggcctattgccgccaagcttcggtttgacgggttttgcacgtcgtgattggaccgaggatcatttcaaggatttcgtgaaggagaacgtgcaggcgcactgccgcacgccattcaaggaggcgacctggaagcagctcgccgacggtattcgttttgtgcagggcacgttcgatgatccgaaggcgttcgaacgattgtcgaacactgttgccgagcttgaccgtgatcgtggcacgcgaggtaaccatgcgttctacatgtcggtgccgccgcgcgcgttcccgcaggtttcccgacagttggcggattgcggtctggcgaagtccgacaagggcgcttggcgtcgtgtgatcatcgagaaaccgttcgggcatgatctggccagcgctaaggagctggatcgtgtggtttccgaggtgttcgacccatcgagtgtgttccgtatcgatcattatctcggtaaggagacggtgcagaatattctggcgcttcgtttcgcgaacgccatgtatgagccgatttggaacaataattacgtcgaccatgtgcagattacccacgccgaggatatcggcgtggccggtcgtgccggatactatgacggcatcggtgccgcacgcgacatcatccagaaccacctgctgcagctcatggcattgacggccatggaggagccggtctccttctccgccgctgatctgacggctgaaaagacgaaggtgctgtccgcagtgcgcttgccgaaggatctggcggcgcatacggcccgcggacagtatgccgccggatggcagggttctcatgaggttgtcggctatttggatgagaagggcattaatccggcttcaaccacagagacttacgcagcgatccgactggatgtcgatacgcgccgttgggccggcgtgccgttctacctgcgtacgggcaaacgtttgggcaagcgtgtcacggagattgccgtggtgttcaagcgtgccccgcatctgccgttcgagtcgaccgcaacgaaggagctcggcaagaatgcgatcgtgatccgcgtgcagcccgatgagggtgtgaccatgcggttcggcgcgaaggtgccgggtggcacgtcgatggaggtccgtgacgtgtcgatggacttcggttacggccgttcgttcaccgaatcgtctccggaagcctatgaacgtctgattcttgacgtattgctgggcgatccgccactgttcccaaccacacgcgaagtggaattgagctggcagatcctcgatccgatcgaagagttctggtccacgcttggccagccgcagccgtatcgttccggaacgtggggccctcaggaagccgttgaaatgctggcccgcgatggacaccgttggaggatgccgtgatcattaccatgaagaacaccgaaacccgtgagatttcggcgaaaatcgatgaattgcacgaggagcgtggcgaagcggctctgggtcgcgtgctcacactgctgatctccacgaatgagacgtcgctggagcatgatctcgccgtggcgaacaacgccagccgtgagcatccctgccgtgtgatcgcaatcgcgccgaattcacgtagggtggatgccgctgccgatgatggcaagccgcacacctttctcgacgcggaagtgcgattcggttccgacgctggcgcgggcgaaatcatcgtgttgcgtccgattggtgggctggttcaccaccctgatacattggtgattccgctattggtgccggacgctccggtggtggcttggtggccgaacgaagctccggcgaatctgtcaaacgatttgctgggttccatggcgcgcagccgtatcaccgatgccatgcattcctcgaatccgatgcggaccatggatgatctgcgccgcaactggtcgtcgaagaatgtggacatgtcgtggactcgcttgactgtttggcgcgcaatgctcgcttcgatgcttgaccagccgccgcatcttccagtaagcggcgtgcgtgtgaccggaccaaagaacttcctgccgttgaatctgctggccgcatggcttcgtcttcgtctgaacgtgcctgttgtggtggaagacgatccgaatgcaaccgccgtgaccggcgtgtatctgacccgttccgatggcgtgctgagtttggaacgcccatccaccgacgatggcatcgccgtattgaacgttccagggcagtccccgcaaaccatgagcgttcccgcacgaaccatcgaggaatgcttgagtgaggaattgggtcgactctatccggacgagatctatgcggaagtcgtgactcaaggctgggatcttatcaattcgaagcactgaatcgattctccgaaacaataaaggaacaatgcaggaaaagcatatggcagaacgcaccaccgttgtatatcccaatcctcagattctggctgaagccgtggccgcacgtacgctgttgaccatcaccgatcttctgtcggaaccgaatcgcactcgcgttgacattgccgtgaccggtggaaccgacggcaatcgagtgttcgacgccatgaacgcgagcccattgaacgatgccgtggactggagccgcgtgcacgtatggtggggcgacgaacgattcgtggccgccgatgacgatgatcgcaacgccaagcaggcgcgtgaggcatggtatggcaaactggttgccgacggccgtatgccggcaggcaacattcatgcgatgccgtccgatgagcgtaacttggaaagtgtcgcggcagcctcacccgaacagactgatgcggtgctggctgaagccgccgcgcaataccagcgtgaactcattgaacagttgggtgagaatccagctttggacatcgccatgttcggtatgggaccggacgcgcatttcgcatccctgttccccgaccatggcgagtcggagatcgacgatccgcatgtgcttgtcgccggtgtgcgcgattcaccgaagccgccgccactgcgcctgacgctgaccgtgccgatgatcgcacgatcgaagcacacgtgggtgttcacatctgaagtacgcaaggcggatgcggttgctgcagcattcgcgcaacgcaacaatccgcatgcgccaagctcttatgccgatggtgaggaactgctgtggcttatcgacaaaggtgccgcctccagattgtgatgcaagaaccgggactatggaatcccgatagccgggttccgttggttccgtgacgggcacgtcacctaagtctctgcctgtcatggattactcccatggctaaacatcaaggctgaatcgtttggatgagtgagcgcgcaacgccatgcgtgtagtatggcggcagtcaaacatgacagaccctgcattatgactatgagaggaaacggcatcatggaacagccatctaagttccaacatcagcttcagcccgatatgccatcgtcttccacgatgtccacgtcacctcatccggaacaaactccgccatggggcgcgctatgggtgttggctttgggactggccatgattgtgctggacagctcaatcgtcaacgtctccatccccaccattatcgacgatatcggcatcgacctgaccgacgcccagtgggtcacatcactgtacaacatcgtactcgccgcgctgctgcttcccttcggcaagcttggcgacgccaaaggacgcaaactggtattccaaattggaactgtgattttcgtggcaagttcattgctcgccgccacatcgcaggacgctggcatgctgctcaccgctcgcgcgttgcagggcatcggtggcgcgatgatcatgccgaacaccctgtccacggtgtccgccacgttccgtggcaagtatcgcgctgcggctttcggagtctggggcgcggtaatgagttcagccgccgctctcggaccgttgctcggcggcgtgcttaccgagaccttggggtggcgatggattttcctggtgaaccttccgctaggcatcatcatttttgtggcaaccattcctttggtgccaaagaccggtggccatacctcgaacatcacttcctcaaccgcttcttctaccattcgattccaaagcattgatgtggacattccaggcgtggtgctgtccgcactgacttctgccctgctcgtattcggacttatcgaaggcgagacctacggctggtggaagcagacttccactcagttgaagatgggtggtctgacatggaaccacggctggctgtcgccggtgccgatttgtctggtcgccggtatgctcctgctggtcgtcttcataaccgtagaacttgcacgaggcaaagccgggcgaccggtgatgctggacatgaccctgttccgcatcaagacattctcgtggggcaatctgtcggctgcggccatcgccgccggcgagttcgcgctggtgttcgcgcttccgctgtatctcatcaacgcgcgcggactcgacacgctacaggccggtgcgatgctggccgtgatgggattgggctctattatcgccggtagtcaggcacatatgctggcctccaaattcactccggtcggcgtggtccaacttggcttggtgattgagatcatcgcggtagccgtgattgcagtcctcatgccggtggaattcgcagtgtggtggcagcttcttcctttgaccgcctacggctgcggcttagggctcgcttccgcgcagctgaccagcgtggtgctgtccgaagtgccgattccccagtccggtgaaggatcggccacccagtccaccgtccgtcagcttggcaccgccatgggctcggccatctcaggcgcggcattgaccatggccatcaatgggacgttgccggcacgacttgaatcccttggactgcccgctaaagtcggcgatggactggccaaggcggtcagcagctcggctggcggtgtaattggctcgttccgcagcggagatggatcggcggcccaattcggtgacgaagcgccgaaaatcgccgatgcgatgacttccgggttcattgagggcaaccgttggacacttttggtggcaggctgcatgctgctcatcggtttgctggcttcggtcgctgtgcgacgcgcggcatcaacgcatagcacacactgacaaacatgaggcagggacgatctgctgaatggttttggtgggccagcagctcaacggcgaaaagttctactgaagccggccgataccaaggcgaaactgatcgcgcggtaaggtggggttatgaaagtagtagtgcaacgagtgagccaagccagcgttgacgttgtcaacgaactgggcaccatcgaccccaccttcgaaccgcagcagatcggaccgggcttcatgctgctggtcggcgtgagtgatgaggatggcgaggaacagctttcttggctggcccacaaaatcctcaacctgcgcgtttttgaagacgaacagggcaaaatgaaccgttccatcaaagacatcggcggcgaaatcctctccatttcgcagtttacgctgtttgccgacgtgaggaaaggcaatcgccccagcttcgtcaaagcaggtaaaccggaacatgccaacatcacgtggatcaaattcaacgaggcgttgcgttctggcggcgtgccagtacgcgaaggccgctttggaacgcacatgcgcgtcggcctgatcaacgatggtccggtcaccatcaccatcgacaccgacaatctgtgatcagtatttgattacaacaccgattgttgggtgatataaaacaattgagggtctgcaagttaaattgcagaccctcaactattataaatactttttgatcgacggtgacgtttacttgttttcggtaattatcgtcaccttgttcggatcaatcttcgttgggtcaagagtcaattccttgatgacatccgcacgaatcgtgccggacgaaggattgaatacactatcgatagtgctgtgaatatcggcatccacattcgaatattcgaaagcaagcgtcgtattgattagacggcaattacgtaatacgagattatccacatggcacaaaccctgcagactttcgatcgtacagttctcaaacgtgacattacgggaattccaagccaaatactcgccggaaatgaatgaatcacgtactgtcacattctcgcaattccagaagcaatccttggaaatcaatcgagaatttgtgatttcaatattacgtacgccatcaaatggataattgccaaccaaacgcagattataggctttaatatcggaacaattcatcgccagataatcgccacgagcgctcacattttccagtgaaacgttcgaacaagcccataatgtttcctcggcattgacgaaatcaacattcctcaacgcaacatcatggcaccggcggaaattcttcggcgcttcaaacgtgcaatcctcaacacgaatggtattcgtataccacacgcccgcgcgtgccatctcgaaccatgtgcaatcctttgccaaaatatccgagcaataccacagcggatacttccatttgaacgaactcgacttaagctcaatatcatgcgcatgcttcaacggtgattcgccatcatcgaaaatcgtgtcgatatatcgcttgcctgatgcttggaattcggcgcgttcgccggtcagtaacgcctgacgaacctcgtgcatgtcactcactgataactctccttgaaaacgttctgttgccaagatagaaagttcaagtacttgaagtcaaacgcatgcccatgtttcgctggcgggcgaagcggatgagcgatggaacgcgttataagcaatgtcgatatgcgtgcgggtgtttgcgaaacatgactgtcggtaccatgaattgaacgattagacaattgggtggttacaaggcattgtggtcgcgaacgggcttgccacgtatggcagggaggaatgcggatgagccagcggaatgggggagtgaagacgcgtgcgttcaaagccgcgttccccaaagtgctgccgatttgcatcagcttcttctttctggccatgtcgtacggagtgcttatgggaacccgcgggttttcgttcctgtggtcgttgtacatgagcgcgttcatctacaccggttccatggaattcgttacggtgaatctgctggtttccgcattcaatccgttcgccacgcttatgttggcgctgatgatgggaacaaggcacctgttttacggactgtccatgctggggcgtttcaagaacatgggggcgaaaaaaccgtatttgatttacgccatgtgtgatgagacgttcgcggtcaacaacagcgcgcaaataccggcggatgttgaccgcggctggttctatttcttcgtgtcgctgctgaatcaggtttcctgggtggctggagcgacgctcggaggcattgtcggcgggcgattgacgttcgacaccaccggtttggatttcgtgatgaccgcattgtttgtggttattttcgtggatcaatggttgacaacgaaacgcaaaagccatatggcggcgttgacgggcactgtggtgccggtgatttgcatggcgctgttcggtgctgacaatttcatgatcccgtcgttgattgccatgctggtgatgttcattatgttgcgtccgtatttggatgatttgaaacctgatgatgttgggaaacgtgatgatgttgggaaacgtgatgatgctgatggtgcggtcgaatccgctgcggatcgtaacgaagtaggggaggtgcggtcatgatcatgaccacatggcagggcgtcgtcactgtactgatggcggtgcttggcaccatcatcacccgttttctgccgttcgtgctctttcccgagccaaagaaaccgccgcacatcatcgactatcttggcaacgtgcttccgtatgctatgaccggactgctggtggtgtattcgctgaaaaacgtcaatccttttgctggaagccacggcattcccgaagcgatcgccatcgccgcgatcgtcgtgctgcacgtatggaaacgcaacatgctgctctcgatcgccggcggcatcgtcgtgtatatggcattacttcagcttgtttttgcatgattgtctgttttgtaggattgcccaaatctgaagtgagttttatagggattttccacagttgttattgctgatatcccatatcgtgagaagaaatgcgttgatgcgattgacgcgcctactctttttctttagccaataaggagctgtgttgagcggctctggctgtatagaagagttatatctaacgagagagaacaatatgactagtgcagcaagcactgccaatgccgcggttccagcgcccggcaaactggagttcaaggatgattacacgcctgaggaagcggaacgcgtcatccgcaattcgaaggggctccctgtcggtgtgaagccgaagatggtgtggacgtggccgaaggccctgctgtgggccgtcatcgccattgtgtgcgctattggttgggctattctggcggtttcccgtggcgagcagatcagcgccatctggttcgtggttgtggcattgtgctcctatgcgatcgcttaccgtttctacgcgtactatattcagatcaagatcatgcgtaccgacgatgcgaacgcgacgccggccgagcgcgtgcatgacggcgccaacttcgaacgtgccgaccgtcgcgtgctgttcggccagcatttcgccggcatttccggtgcgggcccgcttgttggtcctattctggccgcccaaatgggttatctgccgtccgtgatgtggatcattctcggtgtgattttcgccggcgccgtgcaggatatgctcatgctgtggatctccgccaagcgtcgcggccgttccttcggtcagatggcaaccgacgaaatgggcaagttcggcggcactatcctgtcgatcttcctgatcgtgatgaccgccatcgccatggcattccttgcgctcgtggccatcaaggccatggcttcctcgccgtgggccgtgttctctattggtatgaccattccgatcgccttgatcatgggctgcttccagcgtttcctgcatcgtagcgttatcgaaaccacggtgctcggcttcgtgctgctcgtgatcgacatcatcgctggcggttggatctccagcgttccggcaatcgccgacgtgttcacgttgaacgccaaggaactggttatcgcactggtgatctactccttcgccgccgccgcgttgccgcactggctgctcgtcaccccgcgtgactacctgtccacgctgatgaagatcggcacgcttgtgctgctcgtgcttggcattctcatcgccaatccgtccgtgcagatgccggctctgactgaattcgcgtccacctccacgggaccgaccttcgcaggcgacctgttcccgttcctgttcatcaccatcgcgtgcggcgctctttccggcttccacggcgcagtgagctccggcctgaccccgaaggctgtggagaaggaaaaccagatccgcatgatcggctacggttccatgctggttgaatccttcaccgccgtgatcgcactgattgcagccatcaccatttcccagggcgtctacttctccacgaacatgtccgcctcgcagatctccaccgcttccggcgtgaccctgaccgccacttccactcctgacgagcgggctgaggccgcggtcaaggccgtggattcgatgaaggtttccgacattgaaggcaaccagatgaaggtcacttgggattctgtcgacgaaaacggcaatgccaagacctatgaaggcgccgacgctttgaagcaggccgcttccgacattggcgagaacaccatcgtttcccgcaccggcggcgccactacgttcgctatgggtatggccaacttcctcaagtcctacctcggcggtcatgactccatggccttctggtaccacttcgccatcatgttcgaagcgttgttcatcctcaccaccgttgacaacggcacccgcgtggcccgttatcagattggtgagttgctgggcaacgtgcgcaagctgaagaagttcgctgatccgacgtggaaaccgggcaacatcatcaccacactgatcgcaaccgccctgtggggtggcctgctgtgggtcggcgtgtgcgatacgaatggtggtatcaacgccatgatgcctattttcggtatttccaaccagctgcttgccgccgcatgcttcatgctggtcaccgtttgcgtggccaaacttggctataagaagtacctatggattcctgttgttcctctcgtttgggatgtggccgtgaccttcaccgccgacttccagaagatcgtcggaccgatcagttacttcgccaccgcttccaagtatcagacgctgatcgatggtggcactttggaaggcgaagcgttggtcaacgccaaggccgcactctccaatgcgtaccttgacggcgtgctctccgtgttcttcatggtcatgatgggagtcttcctggtcgtcggcatctaccagaccgtgaagattcttgccaagggcaagttcggtgtggaaaccacgtctgaggagccgttcgtggaatccgaatggttcgcaccgtccagcctgatcgccaccaagctcgaaaagaaggtgcagcgcgaatacgcggccaagagctatgagctggcgcagaaggaacaggccgcagcctgatgcagggattcaccaccatggtcagacgaatctggtccgcattattgaaagccaaggccggattcgtctggtatgtgcgcgaattcagcggagaagcgaaatacgaccactatctggagcatttcgcaagcgaacatccctgcgaaaccccgctgaccgaacgcgaatactggcgcatgcgagaggaatacgatcgcaagcatcccaacaccagttgctgttgctgaaactaacggccatacataaacaatccccgtctttcatctcggaagacggggattgtttttcttatatttatgttgcttgcttgcgattattcctataccgaagatattcgattgcatgttccgcaatcaatatttcgcaatcaagaagcgagtcccatgctgtatttcaatgtcatcacacgaatcgcggactgcgttactttgtctgcaaaagcggaatcggccgcggcttttgcgttcagcccatccaaaacctgctgaacataatcggaagcgccaatgcaggcaagatcaccgccggcctcaaccaatcgcacccccaaatcactcggctgaatgccacccaacgcagtggcggacaaagaatccgaagtgatgacaccttggaatccgaccgtattgcgcaaataatccgttaccaaagcgctggagaacacggcgggattgttcggatcaatagcctgataggtggcaagcgacatcatcaccatggaagggttcgcctccaacgtactgttgaacgcgccgatttccgcaccgtccaacgtggtggtggtgtcaagaatgccgtcggcggtgaaatcggtgttgcccgtcaccgaacccaaaccaggatagtgcttgatggcgctgcctacacccgaatccgccatgccctgaatgaacgccttggcatggtcggcattgccgtccgcatcaagaccaaaatcacgatacagtgcgccgatcgggccattggaagccctatctaccgttaccgtgcccaccaccggcgccaaatcaacattgatgccggccgacttgagttgggaaccccatacggcagccgattgccgtagctggttggtcgacattgaaccctgattggtggcggaaggcatctggtcgaaaccagcgccttgaagatgctgcaccaaaccaccttcctgatcagtggtcatcaacagctgattattggccggcgcatacgattgcaatgcggatgtggctgcggcgacaccggccgttcccgaattccagttgccgatgatcagcaccgatccgacatgctggttcacaatgagatcctgtaacgaggaaggatcggatcccgcatacaggggtgccatgacgagctgaccgacgcgctctgcaagactcatggcattgactgcagccacagctctgccatgcggcgagtcgtccaccacgcttggcacgttggatttgtcaagcgcatcatgcgatgcatcggactgctgcgaattggattgctcggattggttggagccagcattcaaactcgcgctggatgaacacccagcgaacgatagcggcagtgcgatggcgcacagtgcggcagcacaacgagcgaaatgaacgtgaactctcctcatagtgtcattatctatcacatgccggtgatggcgaatacgatcgcataagaaaagaacgggtggattcgtgttcgtgaattgcgtaaacattaggctagcggcataaagccgttccgtgcctgtcgataggctattaatatgtctttttttgatatgtttggtcccatgttcgacccagaaagcggtccgaaccgctcccaagggcagcgtgccaataaatccggcaacgatgatcccatcattctcaatgtcgaaaccgatggtgataacaccgcccggtcttcggcgaacatgcctccaagaggtccgtccggtccgcgtatcacacgccagccgaaccgtccgcgcaaatcgtcgaacggcaacaagattctaatcggtgtggtgctggcgcttgccatcatcatcggcctgttctttggcttggcgcagttcatcaccgacgtcatgtggtatgcgcagcttggcttccaaagcgtgatttggacgcagttgggtaccagggtaggcctgtgggtggcgtatgcgctgctgatcgccgcggtcggattcctgtccgcgtcgctggcgatctgggctcgccccgatgctgccgatggttccacgattcgtattaacggcgacaccatcgaagtgggcaagggcgtgagctcaaagagtgcacgtcgtgtggctgtggtgatttcattgatcgtcggcttgatgttcggatcgcagtttaatgcgaattggtctgaaatcctgctgatgttcaacgcgcagagtttcggcaccaccgacccgcaattcggcatcgacaacggtttctatgtgttcgtattgcctggcttgaagctaatcatgtcggcagtgtcgttgctgctgcttgccggcatcatcttctccatcgtcacgcatgtgatgatgggcggcatccgaatcaccatgccagtgcatggtcgtggactgttccacatcaccaagcgtgcgcgtagacagatcggcatctggctgatgctcaacatgttcgcatgggcgacgaatcaggtgcttggcgtgttctcccacctcacgcaggagggtagccgcatcaccggtgccacgtataccacggtcaacgccacgattcccgtcaccttcatcatggctgccatcaccgtcattctcggtgtgattctcggcgtgtggatcatgaagtcgcatgcgttggaaggccaggctccgattgcggtgcgtgcttccgaagcgcttaaagcgtggaaggtgccgaccgtggccatcgcatccgccattgtggtgagcttggtgcttaccgtggcatggccgatgctgctgcagcgtttccgtgtgaatccgaacgcgcaggaaatggaatctacctatatccaacgtaatatcgacgccacccgtgaagcatacggtctgaacaatgtgaagaccgaacagtatcaggccactacggaaggcgaggctggtgcgttggctgattccgcggaatcgaccgcgcagatcagactgctcgatccgcagatcgtttccccgacattcaagcagctgcagcaatccaagcagtattacacgtttgccgatactcttgccgtcgacaagtatgaggtcgacggtgtgagccaagatacggtgatcgcagcacgagaacttgaccttgccggtcttgacaatcgtaactgggtcaacgaccataccgtatacacgcacggctatggtgtggtggccgcctacggcaacaaggtgacggccgacggccagccgaagttctttgaggcgggtattccaacccaaggcaagctcaccgaatccgaacagtacgagccgcgtatctacttctcgccgaacgcttccgaatattcgatcgtgggcgctccggaaggtacgcagtcttgggagttcgattacccgaccggttccgaaggtgccaccaacacgttcggtggcaatggcggcccgaagattggtaatatcttctcccgactgctgtatgccatccgtttcggctccgaccagattctgttctctaaccgtgtgaactccgaatcgcagatcctctacgatcgttccccgaaggagcgtgtggccaaggtcgcgccatacctgacgcttgacggccgtgtgtacccggcggtcgtggatggtcgtgtcaagtggatcgtcgatggctacaccacgtctgacgcctacccgtattcgcagatgaccgatctgggcgaagcctccaaggattccactacggaatcttcggccacggtgagtgagctggcttcgaagaacgccaactacattcgcaactccgtgaaggccaccgtcgatgcgtatgacggttccgtggacctgtacgtgtgggacgaatccgatccggtgatcaaggcatggcagaagatcttccccggccagtaccaccagttgtcggagatttccggcgatctgatgagccacctgcgttacccggaaagcctgttcaaggtgcagcgagaactgttgaccaagtaccatgtgtcgagcgccagccagttcttctccggtgaggatttctggcagactccggtcgatccgaccgaatcccagcaggctcaggaacgcgacattctgcagccgccgtactatttgacgctgcagaccggtggatccaacgaaccggtgttctcgttgacgtcgtcgtatattcccgcaggcacgtcaactcgagagattttgacgggattcctgtctgtcgattccgatgcgggccacgaaaaaggcaagatcggcgcgaactatggcacgcttcgattgcaggagttgccgaaggattccaatgtgccaggccccggtcaggcacagaacaacttcaatgcgtcggccgacgtgtcgaaggaacttaatttgcttgaatccggttccaccaatgtgcagcgaggcaatctgcttacactgccgctcggcggcggattggtgtacgtgcagccggtgtacgtcaagtcttccggttccaccagtttcccgctgttgaagaaggtgttggtggccttcggcgaccaggtcggattcgccaacacgttggacgaagcgctcgatcaggtgttcggcggcaactccggtgcatccgctggcgatgctgaaaacgtcgacggctcgaccagtggcaagactgatacgtccgataccaacggcgatgcctccaccgatggttcttccggaaccgatggcacggattcgtcatctggaacagactcgggcaatgacagcagttccggcaataccggtagtagctccggcacgatgagcaacggtctgaagagcgcgcttaacgacgcttcccaggcaatgaaggattccgacgcggctatgaagaagggcgattggtccgcttatggcgaggcacagaagaaacttcaggaagcgttgaacaaggcgctcgaactcgagcagtagtttccgcacaagttccgtacgattgctgtttgcataaggcgggagactggttccatatggggaaccggtcttccgccttctgcatatgcccggtatgctcaaaaacatgatcgagtattcctaccgcatcgcgacgcaagacgacattcaagcaatcaccgacatttacaacgctgcagtcatacgaggtggatcatcggccgatataactccacgcacatacgaacagcgcaaagcatgggttgaatcgcatcatgatccgtatgcggtgttcgtcacggaaacgatagatgatgacggagagaggcggatcattggattcagcgcgctttccgttttctacgatcgcgcaggatacgacggcgtcaccgatctcgcctattacatcgatccgcaatggcagggcaggggagtcggtacatacacactcaccaaactgcttgaagaatgtcgaaagcgtaatatgcgtaaggcatgcggcattattttcgcagacaatgccggttcgatcgcactgatgaaacggttcggttttacacagtttggcctcatgccaactgccgccaccgattccaccggcaccatgcgtgacatgagttactggtatctcgacctgtaagtacaatctttgcggttatcaagacgagacaacgtgacgcaatatgaacgcgcacaaacgtatgtatgaatgaatggaacgatttcaatggcatctgatttctggttgatcgcaggacttggcaatccgggatccaaatacgaaggcacccgtcacaatatgggatttatggcggccgatctgttggccgaacgttggtcggtcaacttttccgaccataaagggcttgccatgctcggcaaaggcgtgatgaacctgtctggccgtaacgtcaaattcttcctggcaaagccgctcacctacatgaacgagtcaggcaatgcgttggcttccatcagtgcctactatcagattgaaccagaccatattgtggtgattcacgacgacatggatcttgatttcggacgtatcaaagtcaaggcaggtggctccgcaggcggccataacggcatcaaatcaattgatcgtgccttgggaacgccaaagtatgcccgagtgcgcatgggagtcggtcatgcgcaacgcggcgcccacgcccacgacaacacggtgaattgggtgctgggcggattcggtccggatcagcgcaagcagcttccggaattccttgccgacggtgccgacgcggcggaaaccatcatcttcaacggcctcgccaaggctcaggagcagttcaatggccgctgaaccggtgcaactgccgacgtcaggttcgctggctggcattctcgacgtactcgaaaccgatgaggattttcgtgcgctgatttccgacgagatcgaagtgccggaatccgacatagaccccagcatcaccgttggcgttcccgaaggattgcgtccggcgctcgctgccggggcagcgggaacacgaccggttgtgcttgtggtggcttccgggcgcgaggccgaggaaatggttgaggcgattcgttcgtggtattccggcgatccaaacgatgtggcacagcttgaagcgtgggaaaccttgccgcacgaacgtctttcgcctcgcgccgataccgtggcgagccgtatggcggtgttccgcagactgatgcaccctcaagagggaagcaagctgtttggccccatcaggattctcgtcatgccggtgcgttccctgattcagcctgtggttgcgggcttgggggatgtggagccgctggtgttctcccaaggtgaggagttggcgctcgatgaggcgtcgcatcgactggtggagaatgcgtatactcgagtcgacttggtgatggatcgtggtgaattcgcagtgcgaggcggcattatcgacgtgtttcctccaacattgccgcatccggttcgtatcgaattcttcggtgacgaaatcgataccatcaaggaattccatgcatccgaccagcgtacgtatggcagtgacattccgatggtctgggccacgccatgccgtgagctgcagctgaccgaaaaggtgcgcgtgcgtgcgaaatccctgatcggctccattccaaacgccgaagacatgcttgaatccattgccaacgccattcctgtcgaaggcatggaatcgttgcttcccgcattggtcgatgatatggaaccggtgcagggcatgcttcccaagcgtgcgttggtgatgctgtccgatccggaaaaattgcgtcgcgctgccgacgatcttgccaaaacggctaatgaattccttgcagccagttggcatgttgctgcatccggtcatggtgccggtgctccaatcacatttgatcaggcgaatttctacgattttgaggaaacgatttcctcactggtgttctctaggcatgacgtatggaagcttacgagtttcggtgtgggctccagtagggaaggccgcgttcagctcgacgccaccaatcctggagaatatcgcggagatgaggccaagacagcttccggtatcgaaggtcttcttgatgccggctatgccgtcaccgtcactgcaggagcgcaaggcactcttgttcgactcaaacgtgccatcaacgaaacgggaatcgccaacttcgactgcatcagatcgcgtgccatcgacggattcgtcgataatgccgcgaaagtcgcactgcttaccgaacgcgacctgaccggacgtacatcggccgcgggacaggcaaaaacaccgaaacgtcgccgtaaggccatcgaccttatggagctcaaagccggcgattacgtggtgcatgagcagcatggcatcggcaggttcctcgaaatgcgccagcgtaccatcggagcgggcgccaaccagaccacacgcgagtatctggtcatcgaatacgcatccagcaagcgcggcgcacctgccgacaaactgttcatccccaccgaccagcttgaccaagtcagcaaatacatcggtgccgacgctccaaaactcaacaaactgggcggatccgactgggctgccaccaaggcgaaagcacgtaagcatgtgcacgaaatcgccgaagatctggtcaaactgtattcggcacgtcaacgtatgcaggggtatgccttcagcaaagacaccccttggcagaaagaactggaagacgctttcccgtaccaagaaaccgctgatcagctgaccaccatcgacgaagtcaaatccgatatggaaaagcccgtgccgatggatcgcctgatttgcggcgacgtgggattcggcaaaaccgaaatcgccgtacgtgccgcattcaaggcggtgcaggattccaaacaggtggctgtgctggtgccgaccacattgctggtgcaacagcatttcgagacgttcaccgaacgttttgaaggattcccggtggaagtaagggcgatgagccgtttccaaaccaccaaggagatcaacgacaccatcgagggacttgaagacggttccgtcgatgtggtgatcggtacgcacaaactgctcggaccgaaggtcaaattcaaggatctgggactggtcatcatcgatgaggagcagcgtttcggcgtcgaacacaaagagacgttgaaggcgctgcgtaccaatgtggatgtgctgagtctgtcggcaacaccgattccgcgaacgctggagatggccgttacaggcattcgtgaaatgtccacgttggccacgcctccggaagaccgcttgccggtgcttacctacgttggcgcgtatgaggatgctcaggtcactgctgcggtcagacgtgagctgttgcgcggtggccaggtgttctacgtgcacaaccgagtgcaagacatcgcttcggttgccgcgaagattcacgagctggtgccggaatcgcatgtcggcatcgcccatggcaagatgggggagaagcagctcgacggtgtgatccgagacttctggcatcgcgacattgatgtgctcgtatgcaccaccatcatcgaaaccggtcttgatatttccaatgcgaatacgttgatcgtcgatcatgccgaccgtttcggcctaagccagctgcaccagctgcgtggccgtgtcgggcgaggccgtgagcgtgcctacgcgtacttcctgtacgatccgaccaagccgatgacccagcagtcgcatgaccgactggccaccatcgcgcagaacactgcgcttggttcaggttttgacgtggcgatgaaggatctcgagctgcgtggcactggcaatctgctgggcgacgagcagagcgggcatatcgagggtgttggcttcgatctgtatgtgcgcatggtttccgaagctgtcgaacagtacaaggagccggaacgtgcggaatcggttgctgtcaccatcgatctgccgatcgaagcgtccatccccgtcggctacatcgattccgacaaattgcgattggaagcctaccgcaagctggcaggggcacgtacggaagctgatcttgacgagttgcgcgatgaacttacggatcgttacggcaaacctccggtcgatttcgaagcattgttcgatgtggcgcgattgcgattcaaagcaagaaagcttggcattacggaaatcatcggtcaaggacgtaacattcgtgtgtccaaattcgagccacgtgaatccgtacagatgcgcatggcgcgaatctacaaaggcatccagtacaggcctgtcactcaaacgtatgtgatccccaccccgtttgcggggtcgcttggatccgggccaatgagttccgatgagatcgttggatggactaaccaacttctcgacgattttgactggaagccaacgccaaggaaatagcaggtgaagttccagacgcatccgacacgatttgtgtgagcgttcacacaaatcgtgtcggataagtttgccatacgtccacaaaacgcactattctaggcaatgtcatcacaacctaacgtttataaggagtagttgtggcagtaattgaaagcgtttacgcgcgtcagattctcgattcccgcggcaacccgaccgttgaggtcgttctcgacaccgaagacggtgctcagggcctgggcctcgttccgtccggtgcttccaccggtgaagctgaggcttgggagcgtcgcgatggcgacaagtccgtgtatcagggcaagggtgttctcaatgccgtcaaggccgtgaacgaagagatcgctccgaaggtcatcggcatggatgcttccgaccagcgcgctctcgatgaggtcatgatcgagctcgacggcaccccgaacaagggtcgtctgggcgccaacgccatcctcggcgtgtccctggctgctctgtacgcctccgctgagtccgcgggccagccgctgtaccgctacatcggcggcaccaacggccacatcctgccggttccgaacatgaacatcatgaacggtggcgctcacgctgacttcgccaccgacattcaggagtacatgatctccccgtacggtttcgacacctacagcgaggctctgcgtgcaggcgttgaggtctaccacaccctgaagaacgtcctgaagaaggaaggcctggccactggcctcggcgacgagggtggcttcgctccgaagatgaagtccaacaaggactccctgaactacatcatggacgccatctccgccgccggctacgagccgggcaagcagatcggcatctccctcgacgtggcttcctccgagttctacaacaaggagaccggcaagtaccacttcgaaggcgacgatcgtgaagccggctacatgctcgacttctacgagaacctcatcaacgagtatccgatcgtctccattgaggatccgttccaggaagaaggctgggaagactgggctgccatcaccgccaagctcggcgatcgtctgcagttcgtcggcgacgacctgctggtcaccaacccggcacgtctggctaagggcatcgagctcggcgccgccaactccctgctggtcaagctgaaccagatcggtaccgtcaccgagaccctcgacgccatcgagctggccaccaagaacggcttcacctccatggtttcccaccgttccggcgagaccccggacaccaccatctccgacctggctgtggcaaagaacaccggccagatcaagaccggtgctccggctcgtggcgagcgtattgccaagtacaaccgcctgctcgagatcgaggaggagctcggctccaccgctcagtatgctggctacagcgctttcaaggcctgcaagaagtacatcgccaagtgagcgtaagcgcatcgaatatgcgctgatgtagagtgcccgtcgtgttcctcgtcgaacgcggcgggtattttcattgctatgagttcaaagtcacgcaagaaagcatccagaaggggcagtgctggccccatcgcgttctttgtggcggtatttatcgtggctttgggatccatccagctggcgtcgacgttccatacctatgcgctgaatatggctgaattgaatggcttgaagaagcaggaagctgcgctgatagcgcaaaagcaggaactggaaaacgacattgcgcgttgggatgacaaagcttacgttacagcgcaggcaagggatcgtctgggattcgtatttccaggagaacaggcgattcgtgtggaacatcccgaagcggtaaccggcgaaaccacagaagatgcaaaaaagacggatgaatcgcagaaaaccgtactgccttggtataaggaaatggcgtattcgttcaaacaagccgaccaatcggacgaagtgaaatcgaaatcgagggaaacgtccgaaagtacgtcaaccggtgaatcggatgcgaatggaacgagccaggaatccggtggccagcagcagacttcacaagacaataatcaacagcaatcaggagatcagcaggagtgacacagggtatgacaatcagcgaacaggccaaaaccttggcgaagaaggttctcgaccagcctgccaccgagcatgatattgctgtggtcgagcgtcagctgggtcgttacccgcgtggcatggtggctgtcggagcgcgttgcgtatgcggcaggcctttggctgtggtcacgcgcccgctgctgccgggaggtgtgcctttccctaccacttgctatttgactggcccggaagcggtgaaagccatctcccacatcgaagccgaaggcaagatgaaggagtacaacgatcttttggctgaagatgacgatctgaaagccgcctacgagcgtgcgcacgaactgtatttggcgttccggcatgaaatcgccgttgctatggaagacagcgaagagcatatcgaaggcaccagtgccggcggcatgcctgttcgcatcaagtgtctgcacgccttgctggcgcaaacgctggtgatgggcgagggcgccaatccgatcggagacatggcattggaggcgattcgtcatgaattcgaccccaatgtatgccgttgcacggtggaaaacgaagactgaaccatattcagacagaaagaagaagcaatgaaatccgttactgttgccggcattgattgcggtacgaactcgattcgtctgaaggtctcccgagtcagcgaagatggcgtcgaagatattgttccgcgtattcttcgcgtgattcgtctcggtcaggatgttgataagacgcatcgtttcgccgatgaggcattggaacgtgcctacgccgctgcccgcgaattcgccgaggtgctgaaagagcatccggtggatggcattcgtttcgttgccacttcggccactcgtgatgctgagaaccgtgaggaattcgaagataatatcgagcagatcctcggcgtgcgtccggaagtcattcccggtacggaagaggctgatctaagcttccttggtgccacgagcgtggttcgtcgcgacgtcgaagctccgtatttggtggttgatttgggtggcggctctacggaattggtgcttggcggcgacggtgtaagccatccgaacacgcaggtgcaggccgcgttctccatgaacattggctcggtacgtatgaccgaacgccacttgaagaacgatccgcctaccgaagcgcagattcaagaggctgttgccgacatcgacgagcatatcgatgaagcgttcaaaacggttcctgcaggcaaaacccgcactatcatcggcgtgtctggcacagtgactaccatgaccgctctggccatgggattgaccgaatacgaccattccgcggtggatggtgccagctgctcgctagaagacgcttatgcggtcgataacaagttccttacgatgccgcgcgaagagcgcctgacctacaaaaccattcacccgggtcgtgttgacgtggtcggtggcggtgcactggtgtggaatcgtgtgctcgccaaagtcagcgaagcggcctatgccgaccatggtcagcatatcgactccttcatggccagcgaacacggtttgcttgatggcattgtgttggattacggcacgcgattgcttgccgaacgttaacgtggcataatgacttgggcgtcggcttgttcgatgccttgccgccatggcgaaactggtatacgcaaccgacttaaaatcggtctcttcggattgcgggttcgattcccgctggcggcaccgaatgacgttgtgaaatattgctggatagcacgtacgaaacaatccgttattacactggcggcattgataaccccaagtagccgactggaacggaaaaagtatgacgtcgaaagatatcaagccagtaatcgaacagcccgatacggaaattccgctgatgctctcccaagcgattatcgtcgcaggagttttggctgtgggcgaactggcttgttctccgctgtatttctcgttgttgaaggcatcgttggcgttgattccatgggctatggaagcggtgtccatggcagtggcgttcacattcgttgtgggctttgcgttgctgtggtgcgccgaatcgttcacgctcaaaatgcgtgaacggttccgaccgttcgcatatgcgattgttggacttatcggttacggcgtgtggagtctgctggtgttctccgccaccatcaattccgtgcttgccatggtgggggagagtgtgctcaccaatggccagattggtgcgattgcgttgaatggcgcagctcttggtttcgtcgccttcctgttcgccaagttacttgacgttaaactcggcaatcgtaaaaccacggccatcatcatgctggtggtggaagttacggccgccatcattggtttgatcattatgattctcatgttccgagcattgtatgcagcctaagcaagacacctgaggggcaaggcggcgattggtatgttcagtattctcgaaatgttcaagataggcgttggaccaagttcctcacatactgttggtccgatggtggcggcatgcaaatttgtcgaatcacttgaacatacgggaacgcttggccgtgtgagccgcgtgcgcacggtactgtatggatctcttgcgttgacgggcttgggacacggtaccgatcgtgcgactgtggcaggtctggagggtaacatgccgcaaaccgtcgatacggaccatgtgaacatcattcgtcatgaatgcgagtcgagtggggaactgctgctggctggtaagcatcgcatcgatttcgactatgcgcatgatgtggtgatggacgtgtggcatcgcttggccgcgcaccctaatggcatgcgtttccaagcatttgaccagcagaacaatcttgttgatgaacaggtctggtattccatcggtggaggcttcgtacggcaaggcaatgccgaggatctgatgatcggcattcatgagcgtccgccggtcggaacgtctttcgccgatcagcagagtgattcttcacttgatgacggctcggatgtgccatatccattcacgtcatgcgacgaactcattgcattatgcgagaagcaacatatgagcatcgccgacattgtgtgggccaacgaaacggccatgcagtcggcggtgcaggttcgcagcgaactggataacgtgtggcgggtgatgcgtcgttgcgtacagcacggatgccatacgtcgcagaccgtgttgcccggcggtttaaatgcgccccgcagggcaccgaaaatgtatgcaaggcttgcctcgaacagtgatgtgcttgcgcgagacaagaaacgcgcggatgcggtgctcgaatcgtcggatgcggcatgggtggatttgttcgctttggcggtgtcggaggaaaacgccggcggtgggcgaatcgtcaccgcaccgaccaacggtgccgcaggaatcattccggcagtacttcactattactggcatttcgttgaccatgcgaacgaagagggtgttattaccttcctgctcactgcaggcgcggtagggtacctgtttaaacgcaatgcctccatttccggtgcggaagtcggatgccagggagaagtcggtacggcatgttcgatggctgcggccggtttgtgcgcggtgatgggcggtactccacagcaagtggagaacgctgcggaaatcggcatcgagcataatctgggactgacctgtgatcccgtaggaggtttagtacagattccatgcatcgaacgcaacgccatggctgcgaacactgccatcaacgcggttcgtatggccatgctgggagatggaacgcatatcgtgaccctcgatcaggccattaaaaccatgaaagacacgggcgaagacatgatgtccaagtataaagaaacctcaaaaggtggtttggcggtcaatgtcgttgaatgctagcggtggttggtgctagtctaggtggcattgtgcttttcaaggaggttcaccatggcatctcaaatgcccgttgtcaatgttgagttcggcgatcgcccgaccatcgaattcccgtccgagaccgctccggcaggtctgaaggttgtggagctgctcgagggcaatggcccgatggttcgccgcggcgacaccgtcaccgttaactatcacggtgtggtctggggcaaagacaccccgttcgattccagcttcgaccgtcaccagccggccagcttcggcatcggtgtcggccaggtcatcaagggttgggaccagaccgttccggggcataacgtcggttcccgcttggtggtatccattccgccggagtatggctatggttcccgtggcgttccgcaggccggcatcggcggcgaagacaccctggtgttcgtgatcgacatcatctccacccgctgagactaagcggtatagagtaatttccaaggtcaaggaggcaacatggccgaagaaaaaacgcttctgctgacgcaggaagcttatgacaagatgaaggaagagctcgcttggcgcgaaggcgagtatcgcgacgaaatcctttccaaggtttccgcggcacgcgccgagggcgatttgagcgaaaacggcggctatcaggccgctcgtgaggctcagcgagtaaatcagggccgcatcgaggaactgaccgtcaagctgcgcaacgcgaagattctgaccgcgcccaaggccggcgaagtcggcgacggttctttggtgacgctggatgtcaacggacgtgaaatggtctacgtgcttggcacgcgtgacctgtccatcgccacggactacagcatcatcagcccggaatccccgatcggcgcagccatcaacggtgctcacgagggagacacggtgtcgtatacggctccgaacggacgtgaaatttccgtgaccatcaaggaagcaaagccgctcgcctgagtgatgttcgtcataagctgaatctgatattccagcgatataaatacaaggctggttcatcgaatacaacggatgaaccagccttttcgtatatttcgtcaaactgcagtcagatatgacctgaacttacggccatagctgcacgatcaccatgtagatcgccaccatatggcatgcgtaaccagcgacagtgccgcaatggaaaatctcatggaagccgaacaccttcggccatggatcgggcttgcgtagcgcgtatacgatggctccggcgatgtagcaggcgccgcctgcggccaacagcaccacaacagccggaccggcgtacggtgaaatccagaacaatcccatgaatgccactccggaaacaccgaaaataatatacacaatcacgtaaagccagcgtggggcgctgatccagatgacgtgaatgatgagcgccacggtagtgcagatccacatgcccgcgatgattgaattgcgccagaacggttcgagtgcaaaggagaccggcgtataagtgcctgcgatcagcaggaagatattcatatggtcgatgcgtcgtagcacatccgtgacgcgaggtgaccaatcgcccaaatggtagcaggcggaattgccgaacaataccagcgaacacgtcatgaacacggcgcaggcccacttcaaaccggtaccgtgtgccaggcagatcagcacgatgccggccgccaatgccagaggagtggccatggcatgaatccagccgcgcatcgccggcttggggcgaccatgcacgtcaagacgaatcttacgtttgatctccgccggagtgatgccttctattttcgcggcacgagcttcgcccttggctatagccattttcgccttgccgtcggccttcttgcggatgttctcggccttgttgcgtgccttcacgcgaataatatcggccttggcttgaagggcctgttcgcgtgcctcggcgatgatcgctcgtttttcctcgatctctacgtctgtgggtttcgccatctgtgtgcctccactgtaagttacggaaccgtaacctacgttaccgtaactcatggatatgtcaatattgcttttcctgcaatatgcgtcgtgtcgtgcaaaacctctggtgtgatgcgtatgatggagcgcatggctgatttctcacatatcttgacgacccgtcccgatttcgatgacgaagatcgtgaatggctgcatcatctggtcgccgactggcaggtgatcgccgacctgagttttgctgatctgctgctcattctgcaaaatggcgagggcaaatacattattgccgaacagtgtcgtccatccacggtgatgagcctgagggccgacgatgtggtcggcgacgttgtcgaggaggaaatgagcgctgaattggatgccgcgatggcttccgaatcggtgttccgttccacggtgctccgcactgtgggcgagtccacggtgtgcaatgtgtatgcgccggtgcgtcataatggcaagacgctgggcttggtggtacgtgagacgaatatggccacccgggagtcgaacggacgttacgaatccgaaagcatcagcgcaggtaagcagctgtatgagatgattcctcgcggtcagttcccatatcgtaatccgattatgaaccagcgtcacaatgcgcgtgtggcggacggcttcatcgtgctcaccgtcgaaggtatcgtgcgatatgcttcgccgaatgccatcagctgcttccgacgtttgggatcggtcagcaccatgcagggggagtatctgagcgaaatcggcaccaaattgctgcgcgagaacgatcccgtgctggaaaccttgcctctggtgctcagtggcaaagccgccgtcgattccgaactcgatgccaacaagtccgcggtgtccatgcgttcgctgccgttgatggatgccaatggccgcgttggcgctgttgtgctatgtcgcgacgtgactgagcttcgccgtcgtgaaaaggaactgcagaccaaggatgcgacgatttccgaaatccaccatcgcgtcaagaacaaccttcaggcggtttccgcattgctgcgactgcaggcacgtaagaccaagtccgaagaggtcaagaaagagctgaaagaggcgcagcgtcgtgtacaaaccatcgccatggtccatgaaggcttgagccagaccgccgatgaaatcgtcgattacgacaaggtcatttccagcctgttgaagatggcggtggatttggccaccatgcgtgaccagcatatcgacatcgacttcatcggcagattcggcatgatgccggcgcaggatgccacgccgttgtcattggtgctgaccgagctgatcaccaattccgtggaacatggcttcgaaggtcgcaaagaaggtcatatcacgatttccgtgggacgcggtggcaacaacctcaatgttgtggtcgaagacgatggcacgggcttggccaatgaggagcatgatggtatggcacgttcctccggatccggtttgggaacgcagatcatcagcacgttcgtcaacaacgatttcggaggcacggtccgttgggagccccgtcgtggcggtggcacccgagtagtactcgatatgaagctgcgtgcggcgcaggaacgataggaaagatacgaaaatgtccggttgaccaggggaagtcaaccggacattttcgttgtaagtcgctattcgcagagcgtatgcaatgatggatctttgaaaatttcagatctgcatctgcatggcttgggagcggcgggcacgcatggcacggcgcttgagcgcacgacgttcgtcttcgctcaaaccgccccaaacaccgtaatcctgattggtgtcaagtgcgcacttcaggcacgcgtcaatcaccttgcaggtgcggcagacggccttggcctcttcgatctgctgataggcggcgcctgtattgccgaccgggaaaaacagctccggatccttgtcgcggcatgcggccttggcgcgccagtcaaaagcactgctcatataatcgccttcctcttgccatgtacggcatgtaagtccgttattcagataaccacgaatcgcgcgacttttcaagagtcttcgcgaaaagaatcccacgaatcgttaaaaaccttggaattccacgcactgaatagggcatgctttggcctgttgcatgagcacgccacgacctgggagggtatagtcgtctgctgcgaacccgtccagaattgcgccgggaatgccgagcatcagatcgttggaacgttctccgcaggggaacgccacacgagtcggacatcggtccagcagtgcggaaataggtttttccaccgcggcaatcactgtgatattgggattgaccaacgcctcacgcaattcgttcgcttcaggcgcagaggaaaagggattaagcgcttcgtccgcatcatccacaatccagatggttcgcttatgcgacggtaagggtttgccgtcatccgtcaccatgccatgttcggttttgcgtgtgaaacgaatattggcgcaacccgtgtcatatagccagcgtgcgcaatgcaacagtagattggttttgccgctgccgtaggcaccgatgatggcgatattctgttggctcacgtcaagaatggcggtatacaccaatacgccatcgtcggcaagcgcaaagggaacgttatgccatgactggtttgatgggatggaaagatcggattgcgttgcatgttgcgtgagaggctcggaaaacaggagatcggggcgtttgcaggcgtggaatcgtgcggccgttccaatattacggacaagtcggttgacatcgcggaccgcgctgcataggaaaggtgtggtgtgttgtccgtcattgcaataggctgcaccgggaatgctgggaggaatcagcgctgcgtcacgtatgccgatcaattcgttcgactgcatttggtctgtaacccgtaagcatatgctcagcgagatattggctttcatgtcggcatggacttggcccatgggatattgcgtgcagacgatcagatgcatgccaagggaacggccaagtgacgcaagacgattcagccgttgcatatagtcgggcagacggtctcgaagcgcatggaattcatcgatgaccacaaccagtcgtgccggaggccggaccaattggtcgaatctggaaacacgttcggcgctgaccagagcctcacgacgcaccaattcctgttcaatggcattcaacgcgcgaatcgcgtggaacaaatcaagatcgcagacattgccaacggtgtggggaagatgttccaaagcgttgaatgtcgatcctcctttgaaatccaaaaacacaaaatgcagatcatcagggctgtattgcatggcgagcgacaagcaccaactgatgagcaattccgattttcccgaacccgtggtgcctgctaccatggcatgcggtcctgatcgttgcagatccgtgcgaaacaagccatgctccgtgactcctatagggcaggatgatgtggaggaaagccatgttcgtgtgatggtgcgccaaggcagcgcgtcctcgtccagagcgtagaaccgctcgaaacacatatggggcattgcggcgaacggcgaatggctgttttgccttgcggtctccaccacctttgcataggtggtggagacaggttcgtcatgctgctgcttctgattggaacgcaacgccatggatgccagagacaacgcgctgctgatgagtccaggagcaagcatggccacatatagccattgccgttgcgcgatcattatgacaagcatgacaagttgcgacaataccggcgcggcccagttgatgagcatcagccgatcctcattgaatccattggtatgcttgcgcttggttttgctgttcatgccgtcattgtgaacagcagtggcggatggacgcaagcgagaatcagggttgtggtcggaggatatggttatccacatcctgaccacaaccctcagctttgctgttcggcgagcgtgcctacagtgccagcccgatgggtccccttagccaattcggagaacagttcgaggttcttatcctcgtccaagagcacgcttgagccgacaccatcaacgtagtagtcgggatcggtccaataaacgcttcctgaaatgccttgatccccagaagcgcttttgaacgccaaagccatgcgcatcagcgatgaggtcgaagctttctcgtccacggtcacggagcttaacgccgcttccgcgactttcttgaccttgccgaagttcagcagcgtatccttggacgcgccctttttcactatggcgttgatgacctggcgttgacggactgcacgaccgaaatcgccttgcgcgtccgcgtaacgcatacgagaaaacgcaagcgcggcggtgccgtcggcagtatgacaaccggcagtccagttcaactgggagtacggatcgcttacatcctggtcgtagcataattcgacgcctcctaaagcgtcgaccactttgaccagacccccgaattgcaccattgccacgtggttgattttttgcccggtgatgtcttcgacttcgttaaccagttgtttgccgttgtacagttgggcgacggcgttgattttcatgtaactctggtcgatttccaccaaggaatcacgcggaatggaaatcagtgaggaaggtccggatttcggtttggtgagtaccagaatggtgtctgttctgaaaccggtcacgtctcccgcatcgccaatggtgccttcgcgttcgtcggaaccgaggatcagccagctttcgccagcggtatcggctttgttcgtcaaccaagactgtttgttgagctgtccatccacccaattccatgcggagaatatcgacagtcccaaggcgagaatcacagcaaggaaaaacgcgagaatgacccgccccatatgtcgttttctgtgggggagcacggctttcgcagtggattggaatcctgttgtgctattgccggacaaaggttgtctgggcgtgttctgtcgcgttgttcgtggcatgccagtgggtatggaggaggatcctcgtacctgctgagacgcacggtgattgttcggagctgaagcaggagcaaacgatgcaggagacgatgatgccgacttacgtggtctgctggtggagtttgcggcaggacggaaactctgtggagcgctggaaccggatggagttacggatgatggttgcgctgtacgcctgctggcgtgcggggcacttgagcgcgatggctgtgcggcaggcgaaaaactcggaattgacggagagccggattgagaaggaattgtggatttgtgaggctgtgattccgtcttcttccgtcctgcggacgggatgaagctcggtggtgcgggcatggggtccttgccgccgttctcttcactcatacaatatcctccaaaaagaaatccgttcctacaccatttacaccgtgtaggaacggattcggtgaaagcggtctagttctttgcgggaacggcacaaactgtcgcgttgaggtaacgatcggcaagtccgatgtactgcccggtaagagcgtcatggatggagccatcttccggatcgacggtgccaccggtgttcggatcgataagcgtgccatcggcttgcgtgatcagaccagtgaccggatcaggcgtctgtgcggcttcctgggaacccgtgttgtcagtgcccatattatccgtattgtcagtgccatccgtcgaattatcggaagaaccgtcggaattgcctgcggtattggcatccgtgttcgcgtcggattcgtcggaaccataaatcggcttgtccgcgcgcatcttctcccatagcgtctccgcctcatcggtccagaccgaacgattcgggtccgacggcgcggatactaccggaacggtctgcgaatacaggttggacagattgaaatccttgaggctcatggcaagacctgcaagcgctgcggtatcggccatgccttgcgagatatagagtgattgcaaggctgatttcgctagctggtagagctgtgcggtgtcagtaaagaggttcttgctgagcgcttcgttcatcaactgtttgatgaggtattgctgtctggttgttcgtgatgtgtcggatccgtctcccagaccatggcgggttcgtgcgtactgcgttgcctggtgtccgtccagatggtgcaggcccttggtgagttgcaggctggtgtaggggtcgtcgacgtcctgtgggatgcacaggtcgactccgcctacggcattgatcattttgaccagtcctgcgaaatccacgacgatgaagttttgaatgttcagtccggtgaggctgttcactgcattcagggtgcagcttgcggctgaagcgagatcgccgccggtctggtatgcgttcgcgaaaatcgagttgaacatcacattgtattgcgcgggaatcgtgccgttggtcgtttcgcactgcggtatgtccactagggagtcgcgcggaatggaaacgagattgattttggtgcggtccgcggaaatctgcgccaccattgtggtgtcggcctgatggttgcctaccacgtcgtcgaagttgcctccgacggactggttctcttcgccatcgcgggaatcctgcccgatgagtacgaattcgatgggtttgccggagttgggatcgatgatcgaggtgttggcgtcaagtgagccttgtccgatgatttcgaccgaatggtctttgatgatgccattcacatccagccatgttgcggccgctgcggttcccgagaacaccagcatcgccgcgatgaccgaagcgactatcgtcctcgcacgatgctgcactcgatagccaaggctgtgacgcggctttgcgtctcgcagtccattgacgttaggaagcttatcgccggctggtgatgtggtcacggtatcgccttcctgtttatacaaaagatcacgccatatctcaacgcgttctagaacataccactactctgtcatgggattatagagatgttccccgattttcacggattctgcttcaggcccccgtcgttcttggaggtaccatgtaccatatttttctcgaattatagtgattgacacggcggaaaacttgacaaaaagaaattgcatgtgtgtaatttaacacgactaaaagtgcgcatacgtatagcaggggaggacgcatgtggggcgtgatcgatgagtcctccgataatccgcttgcggaactgtggggtctgttcaaaagcgatgatgatgtttcctggcagcatagggcgttatgttctcagactgatccggaagcgttctttcctgaaaagggcggatcaaccagggatgccaagcgagtgtgcgcccagtgcgaggttcgtgagcaatgcctgaaatgggccatcgagcatgatgagcgtttcggcatttggggtggcatgagcgaacgtgagcgccgtcggtataagaaggaacacaaggaacgggcataacgcacggcacaccctgtgcgtacacttgaaattatgaattctaacgccagcagcgatatccagggaattgtgaccgatctgctcaacagcaggccgtactcccatcggcaggatgccgattcatccgtggctgcggtgattaccgcgcaaagcgatctacgttttttctcatccacttttgccgcggtgctcgcacagcatgtgcttccaggcactattatcgttgcggattgcaccaatcaggttgagcagcctatgcagatgacgtttagcattatcccgtcgcctgccggtgtgcttacggaagttcccgaaagcaagaccatacgtgtcattctcgtaggagtgaagggtgcctcttcattcatgaatgccgtggctcgtgcaatgcaacagatcgatcttgacgaccgggtcggtgctctgtggacattgcatgacgattccaggccggccgatgagtcatgccttgaggtgttgctcgatgcttggaaaaacacgccgactgcgtctttgcttggcgcgaaacagttggattggcaggcggaaagcctgcataacgtcggtttgtatgcggggcaccacaatgtcacgtctctggtggtggacggtgagccggatcaggaacagtatgatggccggcaggatgtgttggctgtgtcgctttccggcgcgctggttccattggccaccttgcgtacttggaagggtgccgatccatggttcggcacgttcgccgaatccacggacctgtgcaggcgcatctgcctgggcggtggccgtgtggtggtggtcccgcaggcgcgaatcgcccataggagggcaagatttgaaggcgtgcgttccaaaaacggccaacctgttgaagatgaggaaggccgcgtcgatccgtatcttgcggtacgcgaggcgaatacgaaatacgcgtatacggacgtgcatcgttcttggtggccgctgctgtggatctggtcgatactgaaggcgttgggactggccgtgctgtgcctgacgcgcaaacagccataccatgcctgttgcgaattggccctgccttggcgttcgttgctccacttgccgggcgcatggagggcccgtgcccgattgcgtgagcagagtagggtctccttgaaggcattggccgcattgcagacgactcgtcagcagatcggccaatggaacgatcgcaagcgtgcgtttcttgaccagcgtggcactgtgatcctcagccctcttgccaaggcgcatctgcgtaaaaggctcatgcgcaggtgggggcttgccatcgcatcggcggtgatcgcgttcgcatggatcgtcttcctatattggaatgtgcttcggagcgtattctccggcgcgtcgatatattctcaaacgttgctgccgaccgatgccagtttcagccagttggtgcatgccgccaccacgtcgtgggcgtataccgcgggaacgggaatcagcgccccgagcgcgccttggctgctggtgctcatggtggtttccgtattcacggctggccatgttgcgaccgcagtcgccgtggtgttcttcttgtccgctcctttgatggtgctgtcgttctgggctttggctggaatctttactcggtccgacacggtgcgttgcgtgatcgcgttggcatggttcgccatcgcattgtcgatgaacgtgtacagcgatgccgacgtgacgatgatgacggtcatggtgtttcttcctgcggccttcgcgttttctttccgagccgtaggcatgtaccgtacggaagatctggtcaatccgcaggcttccgtgcaggccgcggcgcttgcggcattgtgctttattcccgtcgtcgcggccgaaccgcaattgctgctgccgctgatgttgtcgttccttgtgttcctgatgcttgtacgctcccatagaacgacgctgctgctgattccgctgccggccgcttccgtatgcgcgcccacattggtcaacacggtacgtttcgcaggagcaggtacgtggcgtcagatttttggcagtgtgatattgccgtcgtctgcgcatgatgggcatccgatgatcgcaaatctttcggatattgtttcccgtgcgttcggcgttgccgtatccggcgagatttggcagtatgtggctgctgcaatgttggcattgattgtgcttcttgccgcggtatcgctgttcctgccattcgtgcttcgcgtgtcgcgtatgatgtgggtcgtggcgatcgcgggtcttgccacgtcgctgctttccgccgcggttgtggttgcggtcgatgcggatggcgccgtggccggttccgtgcttcccggcgtttcattcacgatgatgggactgctgtcttgcgtgtgcatggtcgcaggcggtgcggtgcaacgtttcgtcatgctgtggcagaggcccaccggcgatgtcgaagttgagaggaatggcgcttctactggcattattgccgggcgtgcggcacgaatcgtgctggtcatgctgattgcggcgtcggttgtggcgagtgccggttttgattatgtcgccagagaccataacacggtttcgaccagtgattccggtttgccgattgttgcttccgactatcttgcgcaggatgaggcgaggcgtgtgctcgcagtacgcgcggatagtgccggttccatcagctacaatgtgatgcgcacccgccgaggtgatttgatcgacagctctccggcacagcgtgtcgaagtggcgttcggacgttccgatgatgcgaacaaggccatcgccaaggattgcgcgcagctgttgtcgaatgctgattccgacgccgtcgccgatttgagcgagttgggattcggaggcatctatgtggtgcgctccggcgaagacaaggcgcaaaaggagataaccgatcagttgagttccaatatcagcgcttccgatggcacgcagaatgtcgtaagtactgatgcgggaacatactatcgtctcaccatccaagatacggccaagcagcatatcgaccgcaagggatatagacaggctgaatcgagtgtgtggcgtcaggcatggctgtggtgcatgggtattgttctcgcagcgtattgcttggttgcgcttccgcgcatgaggcgtcacggtcaggaggaagcatgagcaaacattcccgttccaaaacggtttggcgtgtaattctggccatagtgtcggtgttggtcattgtcgcactggcgactgtggccgtaatctaccgcccgacttggattcatgcggattcgccggtaacgcagcgttcatccgtatcccgcaccgtcagtccgcgtcagctggaaacatattgtccagcacgaatgacgatagctgatactgatgtgtatggagacagcgaatatcaagcgtccaacggcaatatcatgtcgtcggcgcgttatgcgtccttcggttcggtgttccgctcttccgtagggcttctcggagctgatgaagccacttcgtcattggtgttgaacaaggatgatgccggatcggatgatgatattttcatggcgtccggcacggtcgatgacggagcccaattgcagaatacccgattgctgtcggcttccgatggaacgggagcggcctcttcggtgatgtcttgggctactgagggagatttgaaaggcgtttccgctgcttcctgcgtcgttccggctttgaagcagtcgctgatggtgtcgggcaccaaaacaggcatgacccagcagctggtcgtggccaatccgtcggctaaggccacgtcggtgaacatcaaggtttggggatccgacaagtcgggtgctttggcattgtctaccggttcgacgttgacggttggcgcgggcaaggaatctgtgctgaaccttgccgcagcagcttccgggcaggatgctttgtacgttaccgtgtccagcgtggacacgcccgttgcggtcgtggtacgcaccatagccatggatggtctggttgcaaaaggatcggattatgcggttcccaatactgttgccgcaaaaacattggcgattgacggactcacggaaggcgatgccgtcaacctgtatgtgtatccgtcacggcaggccgacgtcaccgtatcttggacggatgaccaaggtctgaagaaaaccaatcagcagacgctcgaatcgaatcgcgtttcggtcatcgacctgggttcggttcccaagtcggcgaccggacttaccatcagcgccagcgagccggtatctgtcgccgcgaagatcaccaatgatggcgatgatgaccaggctgatttcgccttggtcaacgcttcagtgccgatgagcgtctccgccatggccgtgcccgaccatgccacggctcaagtgggcatcaccaacatatcgggcgatgagcgcacggcaacattgacgtcctacaacagtgtcggagatactgttgaccagcgcgagattgctctccaatccggcgcttcgacaacggttgatctggcggatatcaacgatggagacgttgccgccgtaagctttgccgatccggaccaatcaatggtgtggaacatccgtatcagccaaaaagacgtatcggatgcgaaactggccggagtgtcgattatcggcgcaacggatctgaaggaagcccgcgagcaggtgctggccaaccagaacatgaccgtcgtgcgttgatcacataccccaatcggggtcgatctcttcgggacggcgtccatacagttccgccaagcgcaacaccacttcgtcgcggatggcgaattgcaggtccatacggcttcgcgcatgcgattgcaaaggtatacggtacagcacgacgcgcggcggaatgccatgttccgcggggaaagactgcgagcccaagtgcgcagtggcctcccaaggcgccgggtcggatggcggaacatcctcgaccgcaaactgtaccggtgccaccagttcgggccatgcatcgttgagcctacggatctgagccaccagcatgtcgtcgaacataccgcttcttgtacgataacgtggaagtctggtaccgaacatgggagtgcgggtcccacgaccatgacggtttctatacactgttgattcccaaggcaattgatacatggcttctaccatatcagggccttgcgcgaatcatgcgatagcatattgttcattgcatcgacacaggaggaaacgatcatgacggatatttccgtgccctgttggaacgacgtggatatcgaggaattgtgcaatggagtacgccttatcgccttcgatctcgacaacacgttggcaaggtcgaaaaagccaatgaaggacgacatggccgaatgcttctccgcgttgacatcgttgattgatgtcgcggtgatcaccggtggcaagtatgcattgctgaaaagtcaggtggtggaacggttgacaggtcaagccaatcggtcgcatctgcatcttatgccgaccagcggcacccgatattaccgttggggcggatcggattgggcgccggtcttcgcccatgacctcagcgcggatgatcgtgcgaaggcttacgaatcgttggaacgcaatgcgcgcgaacagggtatctggctcacgcacgtttggggtgaacgtatcgaggatcgtggcagccagatcacattctccgcattagggcagcttgcgcccatcgaagccaaggaggcgtgggatccaaccaacgagaagaagaatcgtctggcacgagcggttgccgccgatctaccgcatttggaggtacggccgggcggcgccagcagcgtcgatatctccgaaaaaaacgtcgacaagtcgttcgctgttcgagaattggccgatattctcggcattacggtggcgcagattgtttttgtgggagaccgtatggatccggacggtaacgattatcccgcggcaaaggcaggcaccagggcggtgaaggttacctgtccgaacgataccgtgaaattgtgcggtggaatcatcgccagtctatcgcgatagaacctgttgggaggtttcgcatgaactcaatggcgagggcatgctcgatggtggttaatctgctgtttccccggggctgcgccgggtgcgacaaaccggatgaagtgctatgcgaagcttgcagggcattgttttcccagccgaccgcacagtcgtttgacggtgtggcgatgcaacgctggttcgcatgcggatggtaccgtggcacggtcagaagggcggttctcgcgtggaaggatcacggcgacgaggaatgtgaccgtgcgttcgccgatgcgatatgcgcccttgcaaaagcgtctggcgttattgacttcgttcgtgataggcatggttcatgccatgatgttgttgtggttcccgcgccttcgtctcccgcttcaatacgtcgtcgcggacgtaaacatatgatgccgatcgccaaacatctggcaggttttctacgggaggaaacaggctgcgaggtgacggtgcgtgacgcgttggagaacaggggggtcaaagggaaatcagtgcagaccagcggtgcggcgcaacggtcgcaacgtttgaaggggcatgtttcggtgtgtccttcggtttccttgcgcaatacgatggtgattctggtagacgatattgtcacgaccggtgcgaccatgcgcagttgcgtcgaaacgatgcggaaggagggtgccacggtcgtgaccgtgcttgctttggctcacactccggcgggaacgcagaaggttggcccaacgcaagcatggtcacgcacgcaagtgcagtgacgtgagaaatcctctattcgtcatccgtaacatggtatttcggcagaatgatttcaaaatcggctccacgcgggtcatcgacgaccctcaccgaaccaccgtgcaactgggcggcccaacgtgcgatggacaatcccaagccggttccgcccgattcggtgcccggacctgtttttcctttgacgaaacggcggaaaatgtcggaacgcgcctcttgcggaatctgcgatccgaaattgacgacattggtgacgatggtgccgaaatccttgttttcgtgtgcttcgataagcaccgtggtattgtccgcggaatgcttgagcgcgttcgcgatgatattggtgaacagttggcgcaggcggtcctgatcgcctgccatctcgatatcgtcgggcacatgcatttcgatgtcatgcgcatgcccggcatcggcgatttccaaaggttccacggtttcgtcaagaaaatcggcgaaattgaacatttcgatttgcaggcttgccgcgccggcttccatgcgggaaagatcaagaaggaacgcgatcagatcggacaggcggtgcgtctgattgaggatgctttccagatttgatggcgtaggatcgatcacgccatccgccatgttttcgaccatggcttgaagcgctgatacgggcgtgcgtaattcgtggcttacgttggctaccatgtcccggcgcatctggtcggcatgctgaagctcttccgccatttcgttgaaggtgagggcgagctggccgacttcatcgcgactattggagtcgacatggacgcgcacggtgtaatcgccttccgccatcgcttcggcggcgtcgcgcatttggcgcaggggagaggtgaatcctctggagaagaaatatgtgattcctaaagccacggcgagggtaatgggcatggcgatccatacgctgagccctactttgagcaggaaccacgccatgatgaacgcaatggcggtggagatggtgatcagaacgctcaattcaattttgagcgatgagaacaaaccaataggacgttcggtttccaatggattcaccgaacgccctggttttgtatcggtagtacgcataccaccgaattttagcgcattagtcttggacttctggcggttcgaacgcgtaaccgacgccatgcacggtacgaatggtcttcgaaccgagcttatggcgcaatgccttgacgtgcgaatcgacggtgcgagtgccggaagcatccacccaatcccacacttcctcgagcagtttctcgcgagtgagcacggacttcggcttgcgggccagcgtggccagcaaatcgaattccgtaggggtcaggtgcacctgcttgccattgacggtgacgatacgttgcgcgggatcgatgaccaaggagccgaaatcgagaagcttctcgttttcggagtttttggcgatgaccttggcacgatctacacggcgcagcaacgccttgcaacgggcgatgagttcgcgcatggagaacggcttggtcatgtagtcatcggctccggcaccgaggccgatgaccttatcggcctcgtcgtctcgtgccgtcaggatcagcactggcacagggcgctccgccacgatgcgtttcgtggcctcaagaccatccatcacgggcaacatgatgtccatgatgaccagatccggacgcaacgtagtcgcggcctgaaccgcactggcgccgtcggatgccacgcgcgccgtccagccttccgctgtgatgcgctgcgcgatggcagtggccagtgtcggctcgtcttcgaccaccagaacggtgcgtggagccgttgtgggttgtgctgatgagttgagcatagctttccgcctttctcagagttccggcttcaagaatactgcgcccagtgccggaacggtgattttcgcggaccaatcacgtgaatggtattcgccttcgatcgcttcgaccgtgccattgtgaatgccggaaccgccgtagatctcatcatccgtggtcagcacttcggtccatttgccgcccttggtgagcggtacctgatagtcggtccatgcctcgccggagaagttcaccacaaccaccatttgctctccgtccttgccgatacgcacgaagctgagcgtgttgtgatcggcgtcatcgctggtgagccactggaagccggccgggtcgaagtcttggctccaaagtgcaggggaagccttgtacagcgtgttcaaatccgcgacaagcttttgcacaccctggtggtccggccattcaagcgcggcccaatccacggaaccatcatgatcccactcgccgtactgggcgatctcattgcccatgaaggtgaggttcttgcccgggtgggcccactggtaggcgaacagcgcgcggacaccggcatacttctgccaatcattgcccggcatcttgccgaacatggatcccttgccgtacacaacctcatcgtggctgatcggcagcacataatgctccgaataggcgtacaccatggagaacgtgatctcgttgtggtgccacttgcggttaatcggctcctcatgcagatactgcagggtgtcgtgcatccaacccatgttccacttgagaccgaatcccaaaccaccggcgtcggtcggcgcggtgatgcctgggtaagccgtggattcctcggcgatcatcatgatgcccggattgttcttgtatgccgtggcgttggcttccttgaggaagtcgatggcttcgagattctcgcggccgccgtagatgttcggatgccactggccggcctcacggctgtagtccaggtacagcatcgaggagaccgcgtccacacgaagcgcgtcgatatggaactcatccagccagaagcaggcgttggccaccaggaagttacggacctcgcgacgtccgaaattgaacacgtacgtgccccaatccgggtgctcgccacgagtcggatccggatcctcatacaacggcgtgccgtcgaagcggcccagtgcgaacgcatccttcgggaagtgggccggaacccaatccatgatcacaccgatgccggcctcgtgcaatttctcaacaagatacttgaaatcgtcggggccgcccaaacgcgaatcgatcgcgtagtagccggtcacctgataaccccaggatcctgcgaacggatgttccgccaacggcatgaactccacgtgcgtgaagccttccttctgcacgtagggaaccagcttgtcggcaagctcacggtaatcgttcacgtccttgcgccagctggaggcgttcacctcatagatgctgaccggtccgttatgcgggtcgctggccgcgcgttcggccatccaatcggcatcatcccattcatgggtggattcgaccacgatggatccggtgcgcggcggaatctcgtgggagcgctccatcggatcggccttcatggtccattcgttattggcgttgaggatttcatacttgtagatttcgccggcctcaatgcctgggatgaacagttcccaaatgccggaagaaccaagttcgcgcatggcgtgggtacgtccgttccagccattgaaatcgccgaccacgcgcacggcatgcgcgtttggcgcccatacggtgaacgcggtgccaaccacctgctcgccatctacgccttcagaagaacccatcggatcgtcatagcggagcacatgtgcgccaagtgcctcccacaggcgctcgtgacggccttcgccgaatagatacatgtccatctcgccgatggtcggcagataacgatagggatcgtcagacaccacaacggaaccgtcttcatactccgtgcgaatacggtaatctggcacgccgtacccctcttctgctgcggcggcgggaacgagtgccatgaagacgccattgtattcatggattgcgagcgtttgaccttgttcagtgataatcgtcacggattttgccaacggacgcaagactcggatcgtgacgacatccgcatgcttgccggaaccgaggtgcccgccgagcacctcgtgaggattgtagaacgtaccgttgcttactgcatccagtgtgccctggggaacaggaacagcaacgacatcttcattgatcttggattctgtagccatggcaaaagtgtaagcatgaaacggaagaaaagtggcccgtgtcgcgcctatttttccgtttttcaagtgtttttggccaagtccacccctgatggcacaataattcgggttttgtgtaagcttttcacggaggattcatgggttacaaggtcggcgacatggtcgtctatccacgtcacggcgctgcgaaggtggaggccatcaccgaacggacagtcaagggaatcacccgcgaatatctgcagctgtcggtgctttcgtctgacggtctggtcatcaacgttcctgttgataatgccaaaaaggttggtgtgcgagatatcgtcgacgccaacgaagtggccaaggtgttcgagattctgcgcactccgatcattgagaaggagatgaactggtctcgtcgctacaagctgaatgtcgagaagatcgccaccggcgatgtcaataaaattgcggaagtggtgcgtgaccttgcgcagcgtgatgttgacgagcatggtctgtcggctggtgagaagcgcatgcttaccaaggcccgtagcattctgacttccgagatttcgctgtccgaacaccttgatgaagccgaggcccagcgtttgctggacgtgaaccttgggtatgagccggcccagcccggcgatgaggagcatcataccgaggctcccgaggaggctgccatggatacgctggcccgagttgaggccgaaagcaagaagtccaagaagaggtaaggcgtttcatgcgtatcggtcagggttttgacgctcatcgattcgcatctcacgatgcaggcaagccgttatggcttgcctgtttgcgttgggagggcgatggcatcgagggcgattcggatggcgatgtcgccgctcatgcgttgattgacgcattgctttccgcggccggtcttggtgatatcggcaccttgttcggtgtcggctcgcagtccgatggcgcgggcaagcatggtgccgaaatgttgcggaccacggtcgattatctgaacgaacgtggtatgaagccagtgagtgccagcgtggtcgtgatcgccaatcggccgaaaatcggaaaacacagggaagaagccgaacgagcgttgtctgaagccataggttgtgaggtgtccatgaccgccaccacaacggatggcatgggattcactggttcgggcgaaggcgtcgccgcgattgccgatgctttggtggaacctgttgatccatcgactcgtcaggcagtctgatttcgcccgctgacggctttccgatacttctttctgctactttcttttgaaggattcaatagccttcgcaaccgcccaaaacaacgtcgaaattgtcacgatgatgaagctcgggggagcggggaacatggcggaaatcacgagccctccccaaatcgaaatcaggcagatcaccgtggcgacgaccatcgccttgaatggtgagcgggcgatgatgttggcggtggcggcgggggtgatcaccaacgcgaagatcagcaatgtgccgactgcgggaacggcaatggtaatgacgccggccataattgtcataaagcaaatgttcatgaaaccgacgggcacgccttttgcctgtgccacctgctcgtcaagcgaactgaacaatagcgggcggtagatcactgccagaacagccaaaagcagcacgtcgaaaatcgcgaaaccaatgatctgaccgtcggtgatcgtcagaatcgagccgaacagaatcgactgcatctgctgcgaagccgagcttgacatgcgtgcgaaaaagagaccaaggccggtggcgaaagcgagtacggttccagtggcgatctcacgctgtgaagccttcttgccaagcgcgccgatcaccagtgctccgccgagagcgaacacgccaagacctgcggaaacaggcaggccgagcaatacggctccggtggcacctggcagtccgatatgtgccaaggcgtgggctgcgaatgtggaatgtctggcgatggtgaaataacccatcacgccggctgccaatgcgatgcacaggccggcgagaaacgcgttcgtcatgaatggggcgttgagcgtggaaacccaatccgggtcgaaagcgaatacggtaccgtccatgctcagtcctcctgcgtggtgtggctgtgatggtgaaattgcgcgatttcttctggagcatgcgcatcgatgctcatgttttcagactcgtcctcgcttggcgtcacgaacatatctccttgcggagtggtgaccacctgtacggtcgtgccatataaatgcgtgagtagatgggaatccagcacctcgttcatgcctgcatagtgtggatgtccgtcaagcagatagacggctccagtgaggatgggcagaagcatattaaggtcgtgcgccaccacttggatggtcatgccgagttcgcggttgagtttggcgagtacgtgcacagtggcgcgttgactcgccagatcaaggttggcgagaggctcgtccagcatcagcagtttcgggtcatccacgagcgcctgcgcgatggcgaccctttggcgcagtccgcccgaaagttcggataggcgataattcgctttgtcttgtaactcgacgaagtccatggccttgcgggctttctcgcgaagtgttttggtgacgggatgaatgccgaatcgagttcccgtcaagccgagaagcaccgactgttccgcggtgatgttcgattcgatgtcggatgcgtagctttgcggcacgtagccgatgcgccggtttgcggagcctgcaggctgtccgagtaccttgatgctgccgtgcgcggttggaatcaatcccagctcggccttcatcatggtggttttgcccgcgccgttggtaccgacgattgcggttaccgagccttgcggaatgctgaacgtgccgtgttgccagatgacgtgaccgcctcgtttgacgcaggcgtcgtcgaattcgatgcaggcaggtgtctcgtcgtgcatggcttctccttgatttgaatgcacgtacatactcgcaaacagtgttgacaatcattctcaataaggattgtcgttgaaaccgtcgtaacgatcagacgagaggctttgcgtaaaaagcaaaacgtcaggcaaacaaaaaagaccatcccgcattcagttggacgcaggatggtcttggcaaaagcgattaccgatcgattgttcggcaatcgcttttgccgaacaatcatttcaccggatttggttgcggcgcatcgttcgatccgttcgttgtctgatcgttgtcttgcgtcgaggaatctgcggttgattccaaggaatccgcgttttccgacgtgctgtcggaacttgttgcatcctgatcgtcggcatcggattgttcatcgaacatatcggtcaacgacaggataagagcgcggatccacgatgtcaggctggtgtaatcggagggcatctgttcgctgacatcaagcacgggaacgtcggatttgtaagcaatgccggtcagcgtgttcgtggcgtcgcttgtggattgtgtgtcgttgatcagcacctcgactttatgcttttccagcaattcctgaaattcctgaagatcggtgggggttggctcggaattcgtgctggacgattgcagatacccctccggcgtgttgtcggtgaaccccatgtcgctgagcagatagtaggccaccggttcggtggcggcgtaggagacgttcttatgcgagtcgctgaacgccttcatgtccttttctattttcttctcccgcctgttccacgcggtgagtttgttgttgaaatatttcttttgcgcgggcatgatgcggctatatgtgtcggccaattccttggccatggcgtttcgggcgtcactggagaaccataaatgcggattgtctccctcgacggcgcccaccatttgtgctgcggaaacggaaaccatggtcttactgaggttcttggtggcccaagtgtcatagccggcaccattggacactacgacctgtgcctgctgaagtttgtcgatatcgtcggttttcggctcgaaatcatgcgcattgacatcggttgaagagagaaccgacgtgaccttcacatggacgccaccgatctgctcggcaagagaaccccattgattgaccgaggcgaccacttcgattggagtgatctgttcggttggggtttcggagtcggcggaggcgtcattctcctgcgaagttgaccctccggaacatgctgccgtgccgaacgccacgcaaagcgcgattcccgcagcgaaagcgcgtaacaaagaacgtttgtgcaagcgcatgttgattgccctcttcctgaaccgccctaatcgtgttcatctcataaatacgtgtgcgacttacgactgaaaccaagatagcctacgatacatgcaaatgccaatacaacaatgagacaacgaaaaggggagtggccggcatggcggtgaaaatcgatggaaagatggtgtccgcgcagatcaaagcgaatctcgccgagcgagtagcagcgctgaaagagcagggggttaaccccggtcttggaactatcctggttggttccgatgccggatccgtcaaatatgttgccggaaagcatgccgattgcgctgaaatcggtgtgaactccattaagaaggagttgcctgccgacgcaacattcgaacaaatcgccgaagtcgtacaggagcttaacgccgatcctgcctgcaccggctacatcgtgcagttgccgttgccgaagggcatcgacgagaacgccatcatcgatctgatcgaccccaagaaagacgccgatggtatgcacccatataatcttggcgaactcgtgttgcatgcgcgcggcgagatcactactccgctgccatgcactccgcgaggcgtgatcgaactgctcaaagcctacgacattgacctggacggcaaagaggtctgcgtgctcggccgaggcatcaccatcggccgcactattggtctcatgctgactcgcaaggcggtgaatgccacggtcacgctgtgccataccggcaccaaggacgtacgcaagcatatgcgtgaggccgatatcatcgttgcggccatgggctccgccggtttcgtcaagccggaagatatcaaggaaggcgcggtgttggtcgatgtcggtgtttctcgcgtgttcgacgaggaggtcggccgttatcgcgtgaagggcgatgtcgataaagcctgttatgagaaggccttggcatacacgccgaatccaggcggtgtaggccctatgacccgcgccatgctgctggaaaacgtggtcgagatggccgagcgtcagctgtaattgcgctctgtgtgtgaaaatatgaagtaatttcgggcgtgtcgcgggttgcggcacgccttttttgtgcatggtcccatgtagacttacgccttgcgtgtgttatatcgcacgcacataattgaagaccgattttatccacccactatttgtaagaaaccaaattaatggcagagaacaataacgaagtcgccaaggtcgccatcaacgacatcggcaccgaagaggacttcatcaaggcagtcgattccaccatcaagaacttcgatgatggtgatctggtcgaaggtaccgtcgtcaaggtcgatcacgacgaggtcctgctcgacatcggctacaagactgagggtgtcatcccctcccgtgagctttccatcaagaaggacgttgatccggacgaagtcgtcgaggtcggcgacaccattgaggcccttgtcgtcaccaaggaagacaaggaaggccgtctgattctgtccaagaagcgtgcacagtacgagcgcgcttggggcgacatcgagaagatcaaggaagccgatggcgttgtcgaaggcaccgtcatcgaagctgtcaagggtggcctcatcgtcgacatcggtctgcgcggcttcctgccggcatccctggtcgaaatgcgtcgcgtccgcgacctgtccccgtacattggccagaccatcaaggccaagatcctcgagctcgacaagaaccgcaacaatgtggtgctctcccgtcgtcagtacctcgaagagacccagtccgaagtgcgcgaaaccttcctgtcccagctcaagaagggccagattcgcgaaggcgtcgtgtcctccatcgtcaacttcggtgcattcgttgatctgggcggcgttgacggcctgatccacgtttccgagctgtcttggaagcacatcgaccacccgtccgaggttgtcaaggtcggcgacaaggttaccgtcgaggtgctcgacgttgacctcgatcgtgagcgcatctccctgtccctcaaggctacccaggaagatccgtggcagcgcttcgctcgcacccacgttcctggccagatcgtcaagggcaaggtcaccaagatcgtccagttcggtgtcttcatctccgtcgaagacggcatcgaaggcctcgtgcacatctccgagctggccaaccgccacgtggagaacccggagaccgtcgtcaagccgggcgaagaagtcttcgtcaaggtgattgacgttgatctcgatcgtcgccgcatctccctgtccctcaagcaggccaacgactccgtcgatccggcttccgaggacttcgatccggctctgtacggcatgccggcagagtacgacgagcagggcaactacaagtatccggaaggcttcgacccggcaaccaacgagtggatcgctggttacgagaagcagcgtgaggagtgggagtcccagtacgccaccgctcacgatctgtgggagcagcataaggaatttgtggccaaggagctcgagaacgctgaagcttccgccgctgaagatggccaggctccgaaggaagagaaggtcgaagaggtgtcttccaactactcctccgagaacacttccgccggcaccctcgccgactccgaccagctcgccgctctgcgcgaccagctgctcggcaagtgattgtatcctgagctaggatccaatccagctcaggctagattttagaaaagaccccgttcctgattcaggttcggggtcttttcgtatgtgcacggcaagcgcgcatgcgaagcgcattacaatggcggttgtggtgattcgaataggattgactggcggcatagcggctggcaaaagcacggtatccgcaagactgcgtgagcttggtgcagtacttgtcgattatgatctgcttgcgcgtcaagtggtggaaccaggcagcatcggccttcagcgtatagtggaatgtttcggctccgatgctttgaccgatcgaggcgagctcaatcgagcgtggatggcagagcatgtgttttccggcgctgatgcggaacgaaaacgcaagatgctggacggaatcgagcatccactgatttatgaacttgcagtgcaactcgaacatgaggctgttgaagttgattgccaagcagtagtggtgcatgacataccgttactcgccgaagtaattgacagcattccttttgaattcgaccatatcgtaactgttgaagcgcctgaacaggtgaggatcagcagaatgatgtcaacgcgaggcatgagcgaaagccaggcatggaatcgtgtgaaccatcaatccagcgtggaacagcgtcttgccattgccgatgagatcatcgattccacacagtcgttggaacaaatgttcgagcatattgatatgctaatgcaacaatggcgcacggaagcgaggtaggtatgggattcaatattgaacgcacgaacaagccgtttgtggtcaaatcgccatataagccgagcggcgaccagcctaaagcgattgaagagcttgcggaacgcattgaaaacggtgagaacgatgtggtgctcatgggcgctaccggaactggcaaaaccgccaccacggcatggcttattgaacgtctgcaacgcccgacgttgatcatcgaaccgaataaaacgttggcagcgcagctgtgcgccgagttccgtgaactcatgccagacaatgcggtgagctatttcgtttcgtactacgactactaccagccggaagcctatattccgcaaaccgatacgtatatcgaaaaggattccaacatcaatgacgacgtggaacggcttcgccatgcggccacggcgaacctgctgacgcgtcgtgattgcgtggtcgtggcaacggtttcctgtatttacggccttggtacgccggaagaatatgccgggcgtatgctgtttctcgaggaaggccagcagatcgaccgtgatgacttgctgcgtactttcgtcgccatgcagtacaagcgcaacgatatcgccttcaccagaggtactttccgtgtgcgcggcgataccgtcgaaatcattcccgtatatgaggaactggccatccgtattgaattcttcggtgatgaaatcgaccgtatttcaaccctgcatccacttaccggagatgtgatcgggcgtcaatcgcaagtccatattttccccgcatcgcactatgtggcagggccgcaacgtatggagcgagcgttgtctaccattcagcaggaacttgatcaacgtaccgccgaattgcgcaaacaaggcaaggaacttgaggcgcagcgtcttaccatgcgtaccacatacgatttggagatgctttcccaggtcggcgtatgttccggagtggaaaactactcaagacatttcgatggccgtgagccgggcacgccgccgcatacgttattggatttcttccctgacgatttcctactcgtcattgacgaatcgcatgttaccgtgccgcagatcggcgccatgtacgaaggcgatgccagtcgcaaacgcacgttggtcgaacatggcttccgtctgccttcggcgatggacaaccgaccgctcaaatggccggaattccttgagcgcgtcggccagacggtctacctttccgccactcctggcgattatgagcttggcttgagtgacggtgtggtcgaacagattattcgaccgacaggattggtcgatccgcaaatcgatgtgcgcccggttgacgggcagatcgatgatctgcttgctgaaatcaaggatcgtgtggcacgtaacgaacgcgcgttggtgaccacgctgaccaagaagatggctgaggatcttactgattatctgctggagcgtggcatcaaagtcgaatacctgcactccgatgtggacaccctgcgacgtgtcgaattgttgcgtgaattgcgtgagggcaagatcgatgtcatcgtcggcatcaatctattgcgtgagggtcttgatttgccggaagtatcgttggttgcgatccttgacgcagacaaggaaggtttcctgcgttcctatcgttccctcatccagacgattggtcgtgccgcgagaaatgtgtccggcaccgtcatcatgtatgcggatgacatcaccgaagccatgcacaaggccatcgacgagaccaatcgccgtcgtgatatccagattgcctacaataaggaacatggcatcgatccgaagccgctcatcaagaagatctccgatgtcaacgacatgcttgccaaggaggacgtcgacacccagacattgctcggtaccggctaccgtaatgaaggcaaagccggcaactcgcatcttggcgtgcctgctaccagcaaggaggaatctgacagacggcatgaggagattctcaaggccggattgcccgcgcaggatctagctgatctcattcgacaactgtccgagcagatgcatgccgccgccgaacaactgcaattcgagcttgcggctcgtttgcgtgacgagatccgcgacctgaaaaaggaacttcggcagatgacggaggcgagcaaatagttctcgaccggtcatacggcatccgtaccatagtggattatggctgaaacaccacttgtttttgaaatcgccacgttcgcggtgcttgccgtcttcttcgtggttgacttgtttatcatcggacgtaagccccatgtgccctccaccaaggaatgcgtgcagcatatcgcgttctttgtagtcatggcgttgatcttcggcggacttatgtggttcttcgcgggattgaagccggccatcgaattttattcgggctggcttacggaatattcgctgagtattgacaatctattcgtcttcgtcatcattatgtcgaattttgcggtgccaaaacagctgcagaaattcgtgctgtccatcggcatcacgatcgcattggtgttgcgcggcgtgttcatcctcatcggcgcggccattatctcccgcttcacctgggtgttcttcctgttcggcgcatttcttatcgtcaccgccatcaagttggtcactgggggagacgaagatgaggaatatcatgagaatggcttgattcgtgcattgcgcaaggtgatcaagatcaccgatgagtatgacggagaaaagttgcgtaccgtcaaaaacggtgccaagtattggactccgatgctgatcgtctttctgaccatcggcaccaccgatgtgatgtttgcctttgactccattcctgcgattttcggtttgacgaaggatccgttcattgtgttcacgtccaatgtgttcgcattgctcggcttgcagcagctgtacttcctgcttggcgagctgctcgacaagctggtgtatctgcctcttggactttccgtggtgctgggcttcattggagtcaagctcattatggaggcattgcacggcaattcgttgccgttcatcaacggcggtcaaccgatcgcttgggtgcctgaagtgcctacatggctgtctttggcggtgatcgttgtggcgattggtggtgccgcattggccagcgtactgaagatgcgtgccatcgaagcaaaggaaaagtgacgatttgagaaaccgcatggaaacatgcggtttctttttatcaaaaaaatgtgagcgctcacaacacgcctcgtttcagggtggaagtgagcgctttttgctagtagactggtcggttggaaacagggtcgtcagatccaaaatcaatatcaacaagaataggcaggcattcatgcgtaaagccaagatcgtagataccatcggtccagctaccgagtccctggaaggcatcaccagccttgtcgaagcaggtatggacgttgctcgtctgaaccgctcccacggcactccggaagaccacctcaaggtctacaacaacctccgcgccgctgccaaggccaccggccgcaacgtcgcagccctggttgatctgcagggtccgaagatccgttgcggttggttcaagaagaacgccgacggtgaagacaaggtccagctgaccgaaggccaggagttcgtcatcaccaccgacgacatcgagggcgacgagcatatcacttccaccacgttcaagggcctgccgggcgattgccatgctggcgatccgattctcatcgatgacggcaaggttcgtcttgaggtcaccaaggtcgaaggcaacaacgtgtacaccaaggtcgtcgttgccgggccggtttccagccacaagggcatcaacctgccgggcgttgcggtgtccctgccggctctgaccgagaaggatgaagccgatctgcgttgggctatccgcaccggcgccgacatcatcgccatgtccttcgtgcgtttcgccaccgacatcgaccgcgcccacgagatcatggacgaggaaggccgtcgcatcccggtcgtcgcaaagatcgagaagccgcaggctcttgagaaccttgaagagatcgtcaaggccttcgacggtatcatggttgctcgtggcgacatggccgttgagtgcccgctcgaagaggtgccgctggctaccaagcgctgcatcgagctcgctcgccagtacgccaagccggtcatcgtggctaccgaagtgctcggctccatggtcaactccccggtcccgacccgtgcagaggcatctgactgcgccaacgccatccttgacggcgccgacgccactatgacctccaacgagaccgccgtcggcaagtacccggcagtcaccgtgagcaccatgagccgtatctcctccttcgccaccgagcacggtttcgaccgtatcccggagctgaagaacctggatatgtcttccaccggcgccgtgtcttccgcagctgtggatctggctgacaagctgaacgccaaggccatcgttgcctacacccagaccggttccaccgtgcaccgcgtgtcccgcgaacgcccggccaccccgatctacggcatcaccaacaacgagcacacctatcactggctggctctgtcttggggtaccgagtccttcctgctcgatgaggattaccacgacaagtcccgcaaggacctgatgatcttcaccgataagatcctgaaggatgctggcaaggtcaccgatggcgacaagatcgttgtgctgagctccgcccagggcgagcaccagccgggccgcaccgattccatctacgtccacaccgttggagcttgcgactgagatgtgtttcggtcagtgactggctgattagcgaataggagggctttcgtccgtttggatggaagccctcttattgttttcggatgatgttgatttgttgccgatttacagattgcgataggttgcgatcaaagtgttgcacatggtgcgaaacgccgaccgctcaaggactttgcgaaatcatttttctgtgttaagataattaagttgtgtgaaagcccctgtatcccaattggtagaggagacagcctcaaaatctgtacagtgtgggttcgagtcccaccgggggcaccggattaatgaacagccgcggacgggtatcacccgccgcggcgtttctttttgaaacccatctgacgcatgtgcagttacgtggtagctcagtgtcttgccatccaccagattgtagattatctccacgtctccgccttttcgcgcacctcgtcgagcgcatcaagggtctcagccggaatgggttgcctcgacaggctgagcggaatacggttctccctgacgatctgccggtagaacgcgcgggtcacgctggacaggtcaagtccaagatcctccacgatgtccgtagcctgttttttcgtggcgtcgtccacgcggaccgtcaccgaagtcatggtcatctcgacctccatcttttgctgattgttgtaagacgattatagctcaatgtcttacgtttggtatggagagtctgcacatcctgttttttcggttgacgggatgcggattgggactggaccgtgacttgaacgcgatcatccgcatcggggtcgccgggagtgccctggagactctaaacgcgcatggaggagatggaagatggaccggttcggaccgggcaacgtaggctcccgtgaagtgtgaaccaagttgctgcgcgagcgacgtgaggcttggagctggtgtccgcaagaacgccatgcaaactaaaacaaactagtttgtatggcgtcatcaccctcgccggtggtctgaagggccagaacggtccgaccacccagtccgacgtgcggcagatcatcgacctgctcatcccatccgccataatccgtgggcgtcacgctaatacggtactgggtggcttggccgctgtcttcgatgacttggatgatcttgcccttggagtgcaccacagcatctttatgacgcctagtctctctcgaatggtgtacccattgttccacctttaaagggtggtaatttgtgcgtgttgcggtgcgtgggaagccaaataggacgaaagaaaaaccaaagagcgatgtcttgctccattgataaaagctaataaattatcctgataacagtttaaatgtcatataaattatgtcgataagtccaagcgtgtggcgcattttcttttcgggttaagtagatgatcgtgaaagcatgaaagatgtgcgcgcgaaacaactctacaacccgagggggtgcgtgatggcaagattcaatacacagctggtccacggtgaaccggtgaacgacaatgacaccagagccgtgaatccgccgatctataaatcgtccacttttgcatttgagtcggtcgatgccatgccccgttgggattacgcacgtagcggaaatccaacgcgcgaatacctcgaaaggcagatcgcgcagctcgaacatagtactaggggatttgccttcgcctccggtctggcggcgatccatgcggtgctgtccattttccagcctggagaccgcatcgttgccggagacaatgtctatggcggttcgtattcgcagctgaacgagcatttcaaccgctggggtctggaggtcacgtcagccgacacccgcgttctggaagatgtagagcgtgctgtggcgggggatccgaaacggggaatccagccagccaaggcggtgtattttgaaacggtcacgaatccgctgttgaaggtgaacgacgtccacgcgatcgctgaaatcgcccatcgatacggaacgatcgttatcgtggacaatacattcgtgacgccttatctgcagaatccccttgatctgggagctgatatcgtgctgcattccgccacgaaatatctcgcgggccattccgatgtcatcgctggcctagtcgtggtgaaggatgagcagatcgggcagcgtgtctacttcgcccagaaccgtctcggtggtgtcctcgcacccgttgaatgcgattccgtgcgtaagggcatccaaacattggctcttcgcttggaacgacagcaggagaatgccgccgatgtggcgaaatacctgcttgcccacccgttggtgaagaaggtctattatccgggtcttaccgatggcgaggacctggcggccaagggactgcgcggcgctggcggcgtactgagcttcgaggtcgttgacggaatcaatcccgccgatgtgcttaataatcttcgactgttccgccttgcggtttccttgggcgctgtcgagagcctagcggagcttccgtgccgtatgacccacttcgaacttccccgcgaggaacgactgaaagtcggcatcacggatgagctgattcgtcttgctatcggtattgaagatgttgccgatctcaaagaggatttgggtcaggcgttcgagaaggcttcggagaaacactccgacaagtggaacgatgcgatcacagaagatgcattggcctgaccgtcacgattggatgaactggggaggcgaatatgatacgaattcgtggagttcgaaagtcgttcgaatcgcaattagtgcttgacggcgtcgacctggacattccggaacgtagcgttgtctcgattatcggtccaagcggatccgggaaatccactttgctgagaacgattgactttcttgagaccgccaacgctggcaccatcgacttcggagaaggcccggtgtccctcaccagcaccaagccaaaggatatcgcttcggtccgcgcgaaaatcggttttgtgttccagaattacaatctgtttttgaacagaacggtttgggacaatgtggccatcggcctgatccacgccaagggaaaaggcaggaaagaagccgtacgaatcgcatatgacgaactcgaccgggtgggcatggccggattcgcggaccgatatccgagcaaactgtccggtggtcagcagcaacgcgtggccattgcgcgcgcgatcgccatggatccagaactgttggtgttggatgagccgacatcggctctcgatccggaaatggtggacggcgtgctcgccgttatcaaatccttggcggattccggaacgaccatgctgatggtcacccacgaaatgcgtttcgcccgcaacgcctccgaccaagtcgtgttcttcgaaggaggcaacatcgtggaacaggggaagccggaacacatcttcagccatccaaacgagccacgaaccgcacgttttctgtcatcgatacacgatgtcaacgtgctggacgattggaaaccggaagaactcgtgacaattcagcagacgcactccaaatccccaacgtctgaattcagtaattgataatcaacaaaccctccaaaacgttaagaaagaacaggaagaaaatgtctgataccaaatctgtctggaagaaatatgctgccgccgcgcttgctgtcgtttcggtcgttggatttgcctcatgcggatcctcgaacggtgcgggatccgatgattccgccaccagcgagcttgagcaggtcaagaagaacggtgagatcgtgttcggcacggaaggcacgtatgcaccgttctcgtaccacgataccgacgataatctgaccggctacgatgtggaggtcgccaccgcagtcgccgaggaacttggtgtcaaggccaagttcgtggaagcgaattgggattcgctgctcgcgggtgtggacgcgaaaaagttcgatacggttgccgaccaggtgactccgaacgatgaacgcaagcagaagtacgatttcaccgacctgtacacctactcgcagggcgtcgcggtgacgaagaagggcaacgacgacatcaagagcttctccgacatcaagggtaagaatgcggcggagaccaagaccagcaactggaatcagacggcccaggagaatggcgcgaacatcgtctctgtcaatgacttcgcgcaggcggttgacgccattacctccggtcgtgccgatgtcacgttgaacgacaagctcgccgtgctggactatctcaagcagaagccggacgcggatgtgcagatcgcggcaaagtccgaaatcagccccgcggcggccttcccgatccgcaagggtgaggacgacttggtgaaggcgctgaacgatgccctcgcgaagctgcaggaggatggcacattgaagaaactgtctgtcaagtactttggagaggacgtttcggtaaagcagtagaaagatgggtttgcctgttctcaacggatttgcataatgcgtgcggatccgacgaaagcgggccggatatgaggatcgcgcatcatggatgacagactgttgggaatcatcatcggttccttcacgaaattgctgattcctgggctgacggtaaccatcccgctgacactgatatcgttcgcaataggtctggtgttggccatcgccgtggcgcttgttcgagtagccaaggttcctatggtgcatcgaatcgcgcaattctatgtgtgggtgttccgagggactcctctgctggtacaactgttcgttattttctttggtctgccgtccgtgggcattgtcgtgccggcgtttccctcggcacttatcgctttctccctgaatgtcggcgcgtacgcttctgagacacttcgcggagctattctcgcggtgccaaaggggcaggtcgaagccggcctgaccacgaacctcagctatctgaccattatgaggctgatcgtgctgccccaagctttccggtcggcgttccctgcattgttcaatacgttcatctctttggtgaaagacacttcactggccgcgaacatcaccgtggccgagatgttcatggccgcgcagcgtatcgtcgccaccacctatgaaccactggtgctttattgcgaggtcggcgtgatatatcttgctttctgcacggtattgacatggctccaaggagtgtgcgagaagcagcttgccaaacggttctgaaaaaggcatcgagttcagcgccttaacggcaaatcctgtgctccttaaagcaaaaccaataaaaaacgattcgcgtggcattcgcataatgtcgtgaatgccacacaaatcgtttttttggctctgttaactcagggtggacatgagccttcatgttcacaactgtagttgcactgagattacagttgttggaggtgagggtgatgggtctcaccgaggagatccgtagccagttgttcggcatgggcgcattggggcgcagacgggccatcaatgaattgcgatcttctgaggacaagtacgcgcgcagtctcgtcccgtgttggaggatgtggtggctcgcccacgctcgaagcgcggactgtcgaaggagcagatctgcatcatgagcggtgtcttagccagattattatctcttttgctcctcagatcattaacagacctttgaagcttaaggttgttatccttaacaactttaattatggacaatggaaagaactgccggaggaatgtcaaaacaacaaagcggaatcagggacttgctcttgttgatgacttctttggagttcgtgaagaagatctggtaaaccaaacagatttagcgtttgctatagctgacctatgtgggccggggttgggatgtgatgaagatatcgaggcatattgcagcaccgttaaagacgtggatattcttagaaggggctttcgtcctgctcagtcagatgagattaatgtgcttacttatcataaggctaaaggacttgaatttgacatcgttttttgtcttgaagcctatcgttttatcatgcctccatataaaggagtacaaaaagatattgagcaatctcttggcatgcactatgtcggaataacccgtgcaaagaaagcttgctatattgctttggggtctcaacggcacaacaaagatggtttacgagatgctgaaccatcggagtttttaacaaaaaacgaagctcttaaaggactgcgcagagatgtgcactggtgatagatgaagagcctgtgataaacgttccccggttgttgagaggtgaattcgataatcggatgtgcggtgcgttttttgatgggggctactttcgaaaatatcatgcggcgggcttccagacgagaatcgaggtgtgaggcttgagtttgggaagtagatgagaggaagagataatatgcccgtcggcgtttaagctgcgggcgtttttcttgttctactgaacaaaaataagacagcatgacgtagtctaaaaacagcagacactcgtgttggttacatccagacgataggttaattgatagactaaaccgaaagatggtttgcgagagaatccatatgtttgtggggtgaacaatggctgtttccaaagtcgaatctcgtacggtctcggagtgttctctgaacaacatcacgtccatggatccactgaacgaggaatggtacgaaaatctgatcatcgatcatctgacggaaagactcggatatgagcacctgtacgggcccgacgtccgtcgcaccgacgactcgtatcgcgacgtattccttcctgatattctcccggatgcgttgcgacgaatcaacagaaatctgccggaagcagccgtcgaggaggccattcggaagattcagaatgtcgagatcggcagcttggagcagcgcaacgagatattcaatgactacctgcaatcaggagtcgaagtgcacttctttgacggcaaggaagagcgtgatgacatcgtccggctgcttgatttcgacgatcccgagaacaacgatttccatgtcgtgaaccagtggacgttcgtggagtattccgagaaacgtcccgatgtcatcattttcgtgaatggcatgccgttggtgttgttcgagctgaagtccccgtcgagagaggagacggacgcttcacacgcgtacctgcaattgcgccagtacatgaagcagataccgagcatgttcgtgcccaacgtgttctgcgtgatgagcgatatgacccagaccagggtcggcacgatcacatccgacgaggatcgttacgtggcttggaagtcggttgacggcgactattccggaacgaaggccgcgacatggagcaccatgattgacggcatgctcccaaaggagcgtctgctcgatatcatccagaacttcgtgtgcttcaacgattcctccgagaaagtggtgaagatcatcgccgcgtaccaccagtatttcgcggtaaggaaagccatcgtcagagcggaggaggccgtcaatggggatggcaagattggcgtgttctggcatacccagggaagcggaaaatcgctttcgatggtgttcttcgcgcatctgctgcagcgttatcttgaaagcccgaccatcgtggtcattaccgaccgcaacgatctcgacgaccagcttttcggacaattcagccgctgcgccaggttcctgcgccagaaggcggtccaggccgagagccgcaggaatcttcaggaactgcttgagggtcgtgaggcgaacggcatcatcttcacgaccatgcagaagttctcggacggcgacgagccgttgtgcgaccggagcaacgttgtggtgatggtggacgaggctcaccgcggccagtacggcctgaccgaacggatcaacgcggacggtcatgtgtcggtcggcgcggcccgtgtcgtgcgcaaggcgctgccgaacgcgtcctatatcggtttcaccggaacgccgatctccacggatgaccgcaacacccgcgagatcttcggcgactacatcgacgtgtacgacatgacccagtccgtcgaggacgaatccaccaagccggtctactacgaaagccgtgtggtctcgctccatcttgacgagaacgcgctgggccgcatcgacgcggtctacaaggagttcgcggaccaggccgacgaggcgagcgtggagaagtccaagcacgacctcggcggcctcgatgccatcttcgacactcccgagaccatcgacgcgttgtgccgcgacatcgtggaccattacgagaacaaccgcgccgacgtcctggccggcaaggccctgatcgtggcgtacagccggccgatcgcgatgaagatctactacaggatcatggagctgcgccccgaatggaaggacaaggtcggcgtggtgatgaccatgttgaaccaggatccggaggaatggttcgacgtgtgtggcggcaccacgcacaagaaggagatggaacgcaggttcaaggacgattccgattccctcaagatcgccatcgtcgtggatatgtggctcactggctttgacgtgcccagcctgtccaccatgtacgtgttcaagccgatgaagggccacaacctcatgcaggccatcgcccgcgtcaaccgcgtgtgcaagggcaaggagggcggtctggtcgtggattacatcggcattgcaggcgcgctcaagcgggcgatgaaggactataccagccgtgaccagcacaattacggcgacatgaacatcgccgagaccgcctatccgaaattcctcgaaaagctcgacgtgtgccgtgatctcatgtacggcttcaattaccacaaactcatcttccagaacagcagggaggcgcttgccgacgccatcgcggagggaaccgactggctgctcgatccggaacggcacgaagacacggaatcgttcctcaagcaatgccagctcatgaaccaggcgctgagcctatgcaaaagcatggtaagcgaagaggacgcgcatgaggcggcttacctatccgtattgcgcgtgcaggtccttcgcctgaccggacgtggctccggcgggggcagcggcatgacgtacacggagttcaacaagcaggtgagcgagatcctccagcagagcgtgcatgcggacggcgtgctcaacctgttcgagaaggacagcgtggagatctccctgttcgatgaggcgttcctccaggaggtcgccggcatgaaggagaagaacatcgcgatagagagcctgaaacgcctcatcaaggagaaggtgcgggcgtacgggcgcaccagcgtggtcaaatcccagaagttcagcgagatgctccagaacacgttgaacgcgtatctcaacggcatgctcactaacgcgcaggtcatcgaagagctcgtcaacatggccaaggagatcatgaaggaccgcgacgacgcgcagaagctcggcttgagcgacgaggagatggcgttctacgacgcaatcacccagccgcaggcggtcaaagacttctacgacaacgaccagctcgtctcgatagcccgcgagctgaccgatgcgatgcggagcaacgccacgatcgactggcagaagaaggaaagcgccagggccggcatgcggcgtgccatcaaacgtttgctgcgcaaatacaagtatccgcccgaaggtgtcgaggacgccatgaagaccgtcatggaacagtgcgagctgtgggccgacaccaagatcagcgaataggacgagcaggaggataatacaagacatggcaaagaagaaggacaataccgccgagatcggcttcgaggaacagatctggagcactgccgacaagctgcgcggcaacatcgacgcttccgaatacaagaacgtcgtgctcggcctcatcttcctgaagtacatctccgacaagttcgaccagaaataccaggaactcgttgaggagggcgagggcttcgaggaggaccgcgacgaatacgcgagtgagaacatcttcttcgttcccgagagcgcccgctggaagaccatcgcagcggccgcgcacacgcccgagatcggcaaggccatcgacgaggccatgcgccagatcgaggtcgagaacaacaagctcaagggcatcctgccgaagaacttcgcgcgccaggagctcgacaagcgacgtctgggcgaggtcgtggacctgttcaccaacgtgaagatggccgaaaagggcgatagccgcgacatcctcggacgcacctacgaatactgcctggccaaattcgccgaagcggagggcaagaacgccggcgagttctacacacccgcgtgcgtcgtgaagacgctggtcgaagtcatcgaaccctaccacgggcgagtgtacgatccgtgctgcggcagcggcggcatgttcgtacagtccgcggacttcgtcaaacgccatcagggcaacattaacgacatctccgtgtacggccaggagtccaatccgaccacgtggaaaatggcgaccatgaacctcgcgatccgcggcatcgacgcggatctgggcgatcataatgccgacacgttcttcgaggacctgcacaagaccgagaaattcgatttcatcctcgctaacccgcccttcaacctgaaggactggggagggaagaaacttgaggacgacgtacgctggcagtacggcaccccaccggagggcaacgccaacttcgcgtgggtccagcacatgatccaccacctcaaccgttccggccgcatgggcatggttctggcgaacggcgcgttgtccagccagacgaacaacgagggcgagatccgcgccaagatcgtggatgccgatctggtcgaaggcatcatcgcaatgccggacaagcttttctacagcaccggcatacctgtgagcctgtggatcatcaccaagaacaagaagcagtccggcaagacgttgttcatcgacgcgcgcgatatgggaaccatggtgtcccgcaggctccgcgagtttaccgatgaggacatcgccaaggtatcgactgcgttcgacgcgttccgtgacggcactctggaaacggagaagggcttctccgccatcgccacgacggaagatatcaaggcgcaggattacatcctgactccaggccgttacgtcggtgtcgccgaagtggaagaagacgatgagccattcgaggagaagatgacccgtctgaccggcgagatcgccaaatgcttcgaggaatccaaccgtctgcaagagcagatcaagaagaatctggaggccatcggctatggcatgtgaagttgaatggattcctctcggagatattgtcaatctttcttccggaggaacgcctgataaaaaacagccagcatactgggatggtgagatcccttggataagcgcaaaaactttaacaggcgacactgtgacaacaagtaatcttttcatcactgaagaaggactccacgcgggaagcaaacttgctcctgttggttcgatacttttattgacccgcggaagcggcttattcaagagaatccctcttgcaattgtaaacgctcccgttgcttacaaccaagatgtaaaatgcatgacttccaaagtgacaactattaccaatgagtacgttttctttgcattaaaggcactgtccccagagttaacaaatatgctcgagacaaccggaatcggtgcgggtaaattagccactgaccgacttctcgacatgccgattccagttttatctcatgatgagcgagagaaagcagtatctttcttctcggcattgtcccgaaaaattatgatcaacaatcggataaatgattatttgtttgagctcgtatcatcagtttttgcgcatcggtttagcgacaatgtcaatacgactgaactgaaaaacgttctttcgatctcgacaaaggcattaaagccacaagagcacgctgacgaaatatgggaacattacagcattccagcatttgacgaaaagcatagacctatttttgaacctgcgtcaggaatcaagagcaacaagtaccaaatcgacagtgagtgcattcttatctctaagctaaatccatccaccaagcgaatctggatgccatgttgctcaagtaataacgcagtatgttcaacagaattcatcgtgtatagaccatatttgaaagaatataagagcttttactatgcggccattgattcgcctaggtttactgactatctgcttgagcacgtaagcggttccacgggaagtcgccagagagcgcagcccaaagacacccttaactacttgatgccaaatccggataacgaagaaatcaaggatttctgcacttttgctgatccgatatatcgtcatatccagataaatgaacaacaaacagcaaaactcgagttactgcgcgaaacgcttcttccaaaacttatgtccggcgcaatcgacgtttcgaaggttgacctcacgcagctaacaaataatcatttagccgattgttaagagttattttgtattgaatggaatctaaaacttgagcaatagaatcttgcatttcacgagatggcagatcaatgtcaagattttcaatcattctcttagtaagggcgttcctcgttgctccggaagaagctaagctaaggagcgtcgtcttcttagattgcaaagaagccagtaaataggtcgggttgatttcttttccggctcgaacgatcgctacatgctgattcactcgagccggtatgcgttccgaaggaactatgcatgctcgagcgacagaatcacctgtaatgttcaataggacgtcattactgcgtacttcaacgttggagagtgactctgcctgttcatcgtctagaaaagcaagaccatcgggctggaaaacccaatcatgaatgttctggctacgaataattgggataccggcatctttgtaagcttctttaccccctcgcggcgttgctccgcttccgatcttctcgcaaacatccccgagtcgtgtcattccaaataccttctgtgtgaagctttcacgttgttctggttgaccatggcgtagtgcatggtcgtgtctattctcgcatgaccgagcagtttttgcacctgttcgatcggcatgcctttatcgatggcatgtgtggccaacgtgcgtcggaatttatgcggatgaacccgattgatgccggcttcctttccgagctgcctaagacggctttcgatgccgccgatgctgatgcggtcaccgtcaccattcaaagcgacaaatagcgccggattgctgtcgttacgcgattgcaggtatgcggtgagatggagtttcgttctggcgtcgaaatagacgggacgctgcttgtttcccttgcccgtgaccaagcattcgcgttcctgaagattcacgtcggctatattcaagccgatcaattctcccactcgcatgcccgtagaggcgagaatgtccacgatggcaagatcccgcaaggtgctgcatctatcccgcagagtttccagattttcgtcgctcaggacctctttggccattacggccgttttcacacgatggatgcgccttacggggcttttgacgatatagtcctcgtcctcaagccacgcgaagaagcttgacatgatgcgtcgaatgttgtcgatggtgaccttgcccgcatgacgctcgttctcgtatctgttgaggtactcgcgtaagtcgtcgctgcttatccgcgtgtaaggcttggcaagggccttggtcatgtgctgaagcgtgctttcatagtaagcgatggttttcggcgagcagccttcgacctcttttgccgtgaggaatagcgtcagcagattctgcggcacggatgtttcctgagctggcagtagcgtgactctgagtacttcggccaaatgtttgagctgtgacggatcgagcatgttctgcatctgtgacagaacattattaatgatggtttccataggtgttccttccaataacggttaggaacattgtgcccgcgcaccagcaaatgattatttgtttgagctcgtatcatcagtttttgcgcatcggtttagcgacaatgtcaatacgactgaactgaaaaacgttctttcgatctcgacaaaggcattaaagccacaagagcacgctgacgaaatatgggaacattacagcattccagcatttgacgaaaagcatagacctatttttgaacctgcgtcaggaatcaagagcaacaagtaccaaatcgacagtgagtgcattcttatctctaagctaaatccatccaccaagcgaatctggatgccatgttgctcaagtaataacgcagtatgttcaacagaattcatcgtgtatagaccatatttgaaagaatataagagcttttactatgcggccattgattcgcctaggtttactgactatctgcttgagcacgtaagcggttccacgggaagtcgccagagagcgcagcccaaagacacccttaactacttgatgccaaatccggataacgaagaaatcaaggatttctgcacttttgctgatccgatatatcgtcatatccagataaatgaacaacaaacagcaaaactcgagttactgcgcgaaacgcttcttccaaaacttatgtccggcgcaatcgacgtttcgaaggttgacctcacgcagctaacaaataatcatttatcaggctgtgggtctttttgtagcgtttgttgtccgtccggattggcctctgaatttcatgagtggttccgtgaacgttttttctttggttacggtcacctatgcaaagcagatttgggatgggaggatctgccctaaagataccaaggaagaagaatccttgcaggctagttgtgactgtaatcgaggtggggagcaagaactgatgaggccggattttcgaagaagtgaattaaatgagggacaggtcgaaatgaaagtggacgatgatgcgcattcaatcgtgcctggatcaacgtcagcgtatgtccaaaagaactccgtgacgacatctgggtcatcggacaatttattgcaacaattgttgcggttggtaactgttcagggctgtttattggcgttatgtactttgcgtcgatattcatcgagtccggacgatcgacatgacgccgattagcgtagtccaggaaagattgtcgatgaataaactgctggttcgatggacattggaaaccatattcgatgttcatcgaaccggcagtttctatttactttcagtgcttgaccgacagtgtttgctgcaaggtatgtgagtcgtgcggaggcacgatgaccgcgcagtcgcgattgttgacggcttccacgcacacgaagccacgccattcgccgtcgctcaaatctccgatggcattgccggcttgctctcccggattccataccacggtctgcgctgcgccctgcttggagacaatgatggtgcgctgcaacacggggtcgcgcagctcaagcgtatccgccgaatagtagatgcggtcaaccatgccttggaaggtcacaggttcattaccttggttgcaacggggatcgccgtccaatacggtatcgagataatcggtgccctccagcccgcacacctgcgactgttcggcgtctccaacctgcagatacgtatgcagtgcctcttcgtaagacaatggctcgtctccatcgttatatacggtaagcgacatcgtcaactcacagccgacttcaatggtgtaaacggcatgaaattgaggattcggtccagaaacaaactgggaaagtatatctgcgttgatctcgctggaatccaatgtatagcgcaacaaggcatcggaagaaccttccttgtcataatgccagaagctattgcgggcaaaaccatgcttgggcttcttcgaagccacatgcccgccttcgaaaccggaattgaaccaagggaaaataatcggaacaccgccgcggatggcagttccttccttaagatgaatcgcctttggccgccaaaccacagcctgttcgccggcaggtgcccaggaaagcacatgcgcaccgtaatcgctgactgatgccgttgcgtcttcgttgacaatatctctgatagtgaaagtgctactcatacgaccagtataaacaagacgacgttgaagcgggattgtggaaagaaggactttgcaggattgcggaatttctaggatttttcggctttgcacgtgaaggaaaaagaggattgcggcaacacgcgcttgtaggcttctgctagtatcatccatgaaagtacaaggaagatagccggttcgttccaacttgcgtgatggagggtgaatcaaggctgtgaaaagctgaagatttccagaatccgaacgattgcaagtaacggcatcgaatcagtccaggaccaggttggggtttgtgagaccggctttgggtgtgacagtggaaagagaccgacatgtctgcagaaaagaccacggaaccggacgaagtgctcaccgacgatgaacttcaggctgccgcagcgcctgagcagtccatcgaggaagatgacaaacctcgcaagcgtaccgtcgtcgtggccgaagacgaatccgtgaaccgtatggatttggttgccatgctggaagatagtggctacgaggttgtgggcgaagccgctaacggtgaggaagcagtcgaattgacccgcaagttccgtccaagcgtggtatgcatggacgtcaagatgcctcgtatggatggcatcgaagcggcgggcatcatctgtgatgagaatatcgctccggtcgttatgcttacggcattctcccagtccgatctggtcaagaaggccacgggtgcaggtgccatggcatacgtcaccaagccgtatgaggaatccaagctgcttccggctctggaagtggccatgggccgtttcgccgaaatcaacgatctgctcgacaacgtggagcgcagcgaatccaagctgcacgaaaccgaagagcagctgaagaaggcggaagagcagctgaagaaggctgaggaaaccctcgaggaacgtaagcttgtcgaccgtgccaagggcctgctgatggataaggctgacttctccgagcagggcgcgttccgttggattcagaagacctccatggaccagcgcatcccgaagaagcgtctggctatggccatcatcgccaagtacggtgatcagaagtcggaagcagaggatgagcgctaacacagcaactgtggaaggcactacgcgcgggacgctattggtcgttgacggccattccttggcgttccgcgctttttttgccttgcccgtagagaatttcagtacatccgcaggtcaggcgaccaacgccgtatggggcttcgccaccatgctttcgcaggtgatcgacgcggaacatccggatcatcttgccgtcgctttcgatgtcaaaggcggtaccttccgcaatacgatgctgccgcagtacaaaggcacgcgagatgcggctccggaagatctattgacccagctgccgttgattcaacggatgctgacggcccttggcgtcacgttcatcgaaaaacctggatacgagggcgatgatgtgattggcacgttggcgagcatgggagacaaagcaggctatcgcacgctggtgctatccggcgatcgtgacgcgttccagctcatcaacgacaacatcaccgtgttgtatccggggcatcatttcaaagatttgaagcacatgactcccgacgcggtggtggagaaataccacgtcacgccggagcaatatccggatcttgccgcgcttcgtggcgaaaccgccgacaacattcccggcgttcccggcgtgggcgatggattcgcggccaaatggatcaacctgtatggcggacttgaccagattatcgagcatgccgacgaaatcggcggcaaaaaaggcgaggcgttgcgggccaatatcgatcaggtcaaactgaatcgttccgtgaatgccttggtgcgtgaccttgaccttggcgtgtccatcgaggatttgactttcggtcaggtggacgccaaccagctcaaccaactgttcaccagacttgaattcggcatacgcaccaaaaaccgtgtgctgagaacattcaatgcggggaagcccaccaacgatcccgtgcagcaagacgagtccggcaagctcgaaatacctcagtatgaaacggttgactcgccggaagcattggaagcatgggtacgagacaatctgccgatgccgaacgggcatctgcatgacgaacgtgaaatcgcgccgaagacgactccttccggcttcgccattgatcatacgaagcagtgtgcgcagtccgtggcgcattcgtgggtgttgcaggtggaaggcgaaagcaagccggggaacgcggcctatgcgtcgctgatgatcgctgcacatgataaagcgattcgtaccaatcgtgttgaccgtgacatggcgtcccagctgcaaacggtacttgacgaacaccaccaatccatggtggtgcatgggtataaggaacagtcccacctgctggaaagcgtcggtgtggcgttgccgaagccgctgttcgacaccaagcttgccgggtatctggtccatcccgatttccatgccgacacgctggaacaggcggcggcgcatttccttgacctgcatatcgaggaacagtccgagggcgcgacgcaaggcacgcttgatttcgacgagccggacgatagtgcgcagcggaacgacaaccagcttccgcgccatactgcgattgttggtttgctggcgcgtaaactggcggattcattggatcagcgtgagcagttctcattgcttgaatctgtggagattccagtatcccgtgtgctgtatggcatggagcatgccggtgcgcaagtcgatatgaacaggctgatgagcatgcgcgaacagcttgccgccgacgcgaattacgcgcaggaaacggcatggcagtatgcgggcgagcgcgtgaatctgcaaagtcctaagcagttgcagaagattctgtttgaggatatgggcttgaagcctacgaagaagactaagactggttcgtatactacgaatgcggctgctttgcaggtgttgcgtgatcgttcgtatggtaatgatagggcttgtcagtttcttgatgcgttgttgttgcatcgtgagaagaataagcttaagcagattgtgcagacgttgattgatgcgacgaacaggtctgatggtcgtattcatacgacgtttgagcagactgtggctgcgactggtcggttgagttcggttgatccgaatttgcagaatattccgaatcgtgatcctgctggtcgtgagattcgttcggcttttgtgcccggtgagggttttgagtcgttgttgagttcggattattctcaggttgagttgcgtattatggctgatctttctggtgatgaggcgttgattgaggcgttccgttccggtagggattttcataagtatgtggcgagtttggtgtatggcgttcctgtggatgagattacgtctgatcagcgcagtcatgttaaggcgatgagctatggcttggcatatgggctgagcacgtatgggctttcgcagcagcttggcattaagccgggtgaggccgagtcattgaagcggcagtattttgcgacgttcggcaaggtccatgagtatttggagtcgttggtttcttcggctcgtgaaaagggatatacggagacgatttatggtcgtcgtaggtattttccgggcttgaagtcgccgaatcgcgcggtgcgtgatgctgcggagcgtgccgcgttgaatgcgcctattcagggttctgctgcggatattatgaagatcgctatgattcgtgctgatgatgcgttgcatgaggctggtcttgccagtcggattattttgcagattcatgatgaacttgtggtggaggttgcgccgggtgaggcggagcgtgtcactgcgttggtgaaggatgccatggagcatgcggtcgatatggcggttccgttggatgtttccacgggtattggttcggattggcagcttgccgcgcactgatacggtactgggtttcgtgtgtgttgcggatgtgcgtggtcgagcaatggcataaggaggaatgatggcaacgctgaagcaggttgtggatgtgctggaaacgttgtatccgcttcgctatgcggagcagtgggatgagcctggtcttatcgtgggtgatttgcgtcagcctgtgcgcggtatcgcttttgcggctgatccctctatggcggtggttgatcaggcgattgccggtggtgttgatttgctggtttgccatcatccgttgttcttccgttccgttcatgcggtgtcgggattgggtttccgtggtgagattgtgcgtaagctcaatcttgccggatgtgcgttgtgggtggggcatacgaatgccgatgcggcgtatcgtggcgtcggcatggctgcggctgacatgttcggtttggtggatcagcgtccgctggtgcccatcgatgatccggatgccgagcatccggtcggtttggggcgtgtggggcgtcttgccgaacctgtggcgttgcgtgatttcgccagtcgagtagctggcgcgctgccgtacaccgagcttggcgtgcaggtttgcggcgatctggacgttccggtcagcacggtggcggtgcttccgggttccggtgattccttgttcgatgaggtgcgtgcggccggtgccgacgtgtatgtgaccagtgatctgcggcatcatccggtgacggacgccatagagcaggcccgctatgaggcttccatgcgtgcttccggcgttgccatgggccatggtgacgggcgtgtgcgtccggcgttcgtcaacactccgcacagcgctatcgaatccatgtggttccagtatgcgatggaagacgttccccatgcggttgcggaagcgaccggcgacattcctgccgtgcgttggatttccatgaataccgatccatggaatatggtatttccttcgagcgggcaggaacggtgacgcgtcatgtgtgacgaggcggtagacggaacccaggtggacgtattgctggatgaatccagcgatggcgtggacatgtccggtatggtcacggtgcttgacagcaggcatgtgtatcagggtgcgattttcggcgtcgacgacctgcggatcgcattgccgatgcgtgacggagggcaaacggtgattcgccgtcaggtgatgcgtcacgcgccttgcgtggtcatgctggtgcatgattgcgcgaatgacctgtatctgatcgaacgggaataccgtatcggctgcgacgccttcgcctacggtctgccggctggactcatcgacgggggagaggacgtggaggaggccgcgctgcgggagcttcgtgaggaaaccggtgtggagcccgccgggcgtgacggtgtcgaattcgaccatgtggggcagttttactcgtccgaaggcatgaccgacgagcttgccaacatcatggtgcttcacctgcatgcatggcatcccgtcgaacgtcatttcgacggcgatgagcacgtcgaatcggcgtgggtctcctggcagcggctgcgcggcacccgtattacggcctccaattccatgatcgctattcttcacgagcaaattcgacgaaaccggcaaaatacaggcaagagttctttcgaatcgtaaaaataatcgccgaacaacacgaaattgcgatttgggggctgaaacgtgagatacttgaatcatgcaaatcagacccggatcgatgtatccactcggcgcaagctatgacggcgccggcgtgaattttgccctcttttcccaagtggcacaaaaagtcgagctttgccttttcgatgaggaagacaacgaaactcgaatcgaaatgaccgagcagaactcttatgtctggcacaactatctgcccggaatccaaccggggcaacgttacggctatcgcgtgtacgggccatacgacccgacgcaaggcctgcgctgcaacccgaacaaactgctgcttgacccctacgctaaagccatcgaaggcaacatcgacggcgatgagagcctctactcgtactggttcagaagccccgatgacgttaccagcatgaacacgctcgactcggccgcccataccatgaaagcggccgtggtgaacccctatttcgactggggcaacgaccagcatccgaacatctcatatcacgattccgtgatttacgaagcccacgtacgcggcatgaccaacctcaacatggacgtgccgccggacattcgcggaacctatgcgggtctggcgtacccttcggtaatcgaatacctgaagaagctgggcgtcacggccatcgagctcatgcccatccaccagttcgtcaatgacagcttccttcaggaaaaaggcctgagcaactactggggatacaacaccatcggcttcttcgccccgcacaacgcgtattccagctccggacagcgcggcgaacaggtcaacgaattcaaatccatggtcaaggcataccatcatgccggcatggaagtcatcctcgacgtggtgtacaaccacaccgccgaaggcaacaaccgtggaccgaccctcagcttcaagggcatcgacaacggcgcctactaccgtctggtcgacaacgaccgcagacactacttcgacaccacaggcaccggcaactcgctgctgatgcgctcgccgcacgccctgcagctcatcaccgacagcctgcgctactgggtcactgaaatgcacgtcgacggattccgattcgatcttgccgccacattggcccgtcagttccaggaagtcgacaaactgtcggccttcttcgacatcgtcgaacaggatccggtgatctcccgcgtcaagctgatcgcggaaccatgggatctcggctctggcggctatcaggtgggcggcttcccgtccagctggtccgaatggaacggccgctaccgcgattgcgtgcgcgacttctggcgctcgcagccgtccacgttgccggaattcgccagccgattcatgggcagttccgacctgtatcaggtcaatggccgccgaccggtcgcatccgtgaacttcatcaccgcgcacgacggcttcaccatgaacgatctggtgagctacaacgagaagcataatgaggccaacggcgaaggcaatcgcgacggcgaaagcaacaaccgttcctggaactgcggcgtcgaaggtcctacgaccatcaaggatgttaacgagcttcgtcaacagcagatgcgcaacatgttcgccacactgctgctcagccagggcattccgatgatctgcggaggcgacgaggtggcgcgtacccagcagggcaacaacaacgcctactgccaggacaatgcgatttcgtggacgaactgggatctggacgaggatcagaaggatctgctcgaattcgtgtcgaagctgattcacctgagactggaccatccggtgctgcatcgccgtcgcttcttctccggacgtgagcccggagacgacagcaacatgattccgcaggtcgaatggatggaccataccggttccattatggatatggacgactggtcaaacacacacgccttcactgtgatgatctatctgaacggttccgatattccggaaaccgactggtacggcaatcagatggtcgacaatgatttcattctgattttcaacgcgcattacgagccgatcatgttcaccctgcccgatgagcaatatggcaagaaatggcgcttaattgtcgacacgcataatccaaaagggccagaactcaattatgaggccggttttgcgattactgcgcaatcaagaagcttcctgctgttgatgagcgacaagaagccgtccaacaagcactacaacttctgacggcgcactcgcgttatgccgtcagaatctagtggggtggagtcgtcgccaatgcgatggctccaccccactggtatgtatatgttgaaatccggcggttgccggtcagccttgcatcagacttgtgcggcgagcctcgaaactgtgtcgggaacagtttcgctgacttccgcaagatcctcgacggagcgtggtctctcagattgcgccagtatcagctgcgtctgcacgcgatccgcttcgatggcggcgatctgacgcgagaaaatgatgaaccagccaaggaacatcatgccggccaacgcctccacattcgtcagcgtgttatgcccgctcagccattggaatccggcataagccccaatcgcaatcgcaagatcggaaaccacgtatacgacctttgagagttgcggggcaagccaaggcagggcaatcatcagcacgctcatcaaacatggcaggccgcgggcgaacacgttgtgcaaaatcggatgcggcgtgtaacggaacatgccgatacctacgaaagcaatgccggccaacgtcaacatgattgacagcagcagaatcctcgtacgaaaatgcttcggcgtctcattgatggcattggaatccagatactgcaattgcagacgatacgtggtgatgagctcggaaacggcgaaatagctgatgatcacaatgcagatgcccgcgagcgtcagcgtcgaattgaacatacgcgcggcgaacgtcgtacggtcgcccaattgagagaaattattgttgtaccagtacggatcgtcggacgtcaatcctgcgatgcttacgccggacaccacgaaaaacggcagtagggaagcgatcgttttggcattcataagttccgcctgcacgaaagtgatatagcctacaacgcctgcgatggccgcgcataggattggcagatagcctttcagcgtgcggatgcccatcatgttgttgatgatggacaacatcatgaacgatgtgacgaaaatggtcgacgcgtacaccacggaaagcgcaaggatctcgaaaacacggcgaaccggaatgacccagccatgcttgagtgtcagcgaacgtgattttcgtgcgtaacccaaactgaatgaaacgactccgcatcctgccacgattcccgagcagacggtgaacagacgctgcgtgacacgccagatggccggggcgaactgcatgtatgcgttcatggcgaaccaggcgataatggcgcatgtcacaaaggagatgatgcctgacgattcggcctgctggtgacgtcccatgccgttctcctttccgaaacgctattgtaagcctgtcgttgtccaaccatacgctataataaaaactcgtgttcacttgatgcgattccgtgaggcggattcgcggggtgtgaacgtgaacgggctgtagcgcagtttggtagcgcgtctgctttgggagcagaatgtcgcaggttcaaatcctgtcagcccgaccaaaaccgttggaaacaaaggtgtttcagacggtttgaaaaatcctttccccggtttccggtacaaacacgacgatcgcgggaattcctcgtggcattttgtgatattcgcatagttctgtccgcctgggttttcaaacggaaatggtatggatggcatttgattgtcgagatcgagcaagatacgcacgctacatggcgagattgaagcgttgtttgccacgggttttggatacgataaaccctatgaacgcatctcaagagaatctttggccggcgccgtttgccagcaagtcgcttgacgccaccgttgtggtgccgggcagcaaatccctgtcgaaccgttatctcattcttgcggctctcgggcatcgtcctgtgcgattggtcggtctgctgcgctcgcgcgataccgagctgatgatggacgcattgcgcgcgttgggagtgcgctgcgaaatcgatgagcaggtcgacaccacggttacggtggcgccgccgtccgacggccggttccacggtggtacgaaggtgttctgcggtcttgcgggaacagtgatgcgctttgtgcccggtcttgccatgttcgcggatggtcctgtggatttcgacggtgacgagcaggcgtacgcgcgtccgatgaagcccgtgttggacggtcttgaacagttgggggcatgtatcgaataccacggcgaggaagggcgcctgccatttacaatcactccacctcaaacggtgagccagcgcgccgagccgagcgtagtcagcattgattcttcgggatcctcgcagttcatttcaggactattgctcatcggctctcgagtgccaggcggtttggaactgcatcacacgggggagaagacaccgagtttaccgcatattcgcatgaccgtggccgatctgcaaggttccggcgtgcgcgccaacgccgacgaacacgcccgcgtgtggaccgtgcagccgggagccgtgcagttgcccaaaacggtgacggtagaacctgacctgtcgaatgccgccccgttccttggcgcagcgctcatcgccggaggagccgtgcgcgtgccccattggccggaatccaccacgcaacccggaggcctgcttccgggatatttggaacgtatgggagccgaaatcagctttccggtgattgacggcgtccggtactgcgaagtgaccggcgacggccatgtcagcggcctaggtgatttcgacctgacggcggcaggtgagatcgcgccatcattggccgcgatcctggtcttcgccgatactccgacgcgcatgctgggcatcggtcatctgcgtggccatgagacgaaccgcttggaagcattggtcaacgagatcaccagagtcgggggagaggcccgagagcttcccgacgggctggagatcgcgccggtgccggcagcgaatctcaggccggctgaaatggaaacctatgcggaccatcgcatggcgacgttcgccgcgatgctggggctgaaaatcaacggcattctaatcaagaacatcgccaccactgcgaaaacgcttcccgatttcgcagatatgtggactaacatgcttgcctagcaatagtcgtttcggaatactctgtcatattccgattatccaaagatattgaaaacggtaaagaaacgtccttcctctgtgcaatttcagaagtgagcagcgacgaggcgtccgataccttgcgaggtgcgatttggctcgtgcctagaagacggaaggcatgatgaagcctccggaagtttcgcacttccggaggcttcatcatattgattgtgattttgcgttcagtaacgaatcagcttggaatcactcccattcgatggttgccggcggcttggaggtgcagtcgagcaccacacggttgatctgacggcattcattggtgatacgcgtcgaaatcgtggcaagcacatcgtacggaatgcgggaccagtctgcggtcatggcatcttcggaggaaaccggacgcaacacgattggcgaaccatacgtacgctcgtcgccctgcacacccacggaatgcacatcggcaaggagcacgaccgggcactgccagatatcgcggtcaagaccagccttggaaagctcctcgcgagcgatggcgtcggcctcgcgaagtagatccagacgctccttggtgatctcgccgatgatgcggatgccgaggcccgggccagggaacggctgacgccagacgatttcgtccggcaatccaagctcggtaccgatggcacgaacctcatccttgaacagggtgcgcagtggctcgacgagctggaacttgatgtcgtccggcaggccgcccacattgtggtgcgacttgatgttggctgcgccgtcgccgccgccggattccacaacatccgggtagagggttccctgaacaaggaacttgacttccttgccggaagcgcccgcctcttcgatgacctgacgctgagccttctcgaacgtgcgaatgaacttttcgccgatgatcttacgcttcttctccggctcgctcacacccttcagggcggtgaggaagtcttcggaggcgtccacggcgatgagcttgatgccggtcgcctcgacgaaatcatgcttgacctgctcggcctcgcccttgcgcagcagaccgtgatccacgaacacgcaggtgagctggtcgccgatggccttgtgcacgagagcggacgcgaccgcggaatcaacgccgccggacaggccgcagatcacctgtgcgtcgccgaccttctcgcggatcttcgcgacctgatcctcgatgatgctggaggcatcccagttgttgccgagccctgcgcacttgtgcaggaaggtctcgataagctgctggcccatcggggtgtgcttgacttcaggatgccactgcacgccgtacaacttgcgggattcatcctgcatggcggcaacaggcgcaccctcggtatgcgccagcacttcaaagccctccggcgcggtcttgacggccacgccatggctcatccacgtgttctgatcggcgggggagccgtcgagcagaccttccgacttgtcgatgaaggtctcggtcttgccatattcgccaagggcggccttgtcgacatccgcgcccaaggcataggccatggcctggaagccgtagcagatgcccagcacgggaacgccggcctcgaacagtttcttgtccacacgcggcgcgcccggttcgaacaccgaagccggaccaccggaaaggatgatggcctgcggatccttggccagcatctcgtcgaccggcatggaatgcggcacaagctccgaataaacattggcttcacgcacgcgacgtgcgatcagctgggcgtactgggctccgaaatcaacaacgagcacaggacctgcagccataacactctcccttttgatatgaggtatgaagaagcaacaatactaactgttctattgtggcgacgcgagcagacattggaaacgctgtgaacagaaagtgaacaaacctcacaattgcttactacgcatggttcaacacgccgcatgcaagtattgcaaaacgaacgtgaaaaagatgcggaggtagctcaatatcgttgatattgagccgtttatcaatctttttgataccatgtgaagtattcacaaatctcccgataaaagttctcattttctaacagaaacgacacacttgcgcacacagtcgcaaaaaaacagcaaaaagtcgcacctcgctcgtaatatgctcaagtgattgggaatgaatcgttccgcggaaccgcaaggttttgcgagattcaggaccgaatgaaaataaacaatcgcacaacacagtgcaggagtacaggagtacacatgacgagtcctgttattggcaccccttggaagaagctgaacgctccggtttccgaggaagctatcgaaggcgtggataagtactggcgtgcagccaactacctctccatcggccagatctatctgcgtagcaacccgctgatgaaggagcctttcacccgcgaagacgtcaagcaccgtctggtcggtcactggggcaccaccccgggcctgaacttcctcatcggccacatcaaccgtctcatcgctgatcaccagcagaacactgtgatcatcatgggcccgggccacggcggcccggctggtaccgctcagtcctacctggacggcacctacactgagaccttcccgaagatcaccaaggacgaagctggtctgcagaagttcttccgccagttctcctacccgggcggcatcccgtcccactacgctccggagactccgggctccatccacgaaggtggcgagctgggttacgccctgtctcacgcctacggtgctgtgatgaacaacccgagcctgttcgttccggccatcgtcggcgacggcgaagctgagaccggcccgctggccaccggctggcagtccaacaagctcgtcaacccgcgcaccgacggtatcgtgctgccgatcctgcacctcaacggctacaagatcgccaacccgaccatcctgtcccgcatctccgacgaagagctccacgagttcttccacggcatgggctatgagccgtacgagttcgtcgctggcttcgacaacgaggatcacctgtcgatccaccgtcgtttcgccgagctgttcgagaccgtcttcgacgagatctgcgacatcaaggccgcagcccagaccgacgacatgactcgtccgttctacccgatgatcatcttccgcaccccgaagggctggacctgcccgaagttcatcgacggcaagaagaccgaaggctcctggcgttcccaccaggtcccgctggcttccgcccgcgataccgaggctcacttcgaagtcctcaagaactggctcgagtcctacaagccggaagaactgttcgacgagaacggtgccgtgaagccggaagtcaccgccttcatgccgaccggcgaactgcgcatcggtgccaacccgaatgccaacggtggtgtgatccgcgaagagctgaacctgccggccctcgaagactacgaggtcaaggaagtcgccgagtacggccacggctggggccagctcgaagccacccgtcgtctgggcgtctacactcgcgacatcatcaagaacaacccggactccttccgcatcttcggaccggacgagaccgcttccaaccgtctacaggccgcttacgacgtcaccaacaagcagtgggacgccggctacctgtcctcccaggttgacgagcacatggctgtcaccggccaggtcactgagcagctctccgagcaccagatggaaggcttcctcgaggcctacctgctcaccggccgtcacggcatctggagctcctacgagtccttcgtgcacgtgatcgactccatgctgaaccagcacgccaagtggctcgaggctaccgtccgcgagatcccgtggcgcaagccgatctcctccatgaacctgctcgtctcctcccacgtgtggcgtcaggatcacaacggcttctcccaccaggatccgggtgtcacctccgtcctgctgaacaagtgcttcaacaacgatcacgtgatcggcatctacttcccggtggattccaacatgctgctcgctgtggctgagaagtgctacaagtccaccaacatgatcaacgcgatcattgctggtaagcagccggccgctacttggctgaccctggacgaagctcgcgctgagctcgagaagggcgctgccgagtgggagtgggcttccaccgccaagtccaacgacgaagcccagatcgtgctcgcctccgctggcgacgttccggctcaggagatcatggctgctgccgacaagctcaacgagctcggcatcaagttcaaggtcgtcaacgttgtggatctggtcaagctgcagtccaccaaggagaacgatcaggctatctccgacgctgacttcgctgacctgttcaccgaagacaagccggtcctgttcgcttaccactcctacgctcgcgacgtgcgtggtctgatctacgatcgcccgaaccacgacaacttcaacgtccacggctacgaggagcagggctccaccaccaccccgtacgacatggttcgcgtgaacaacatcgaccgctacgagctcgttgccgaagctctgcgcatgatcgatgctgacaagtacgccgacaagatcaacgaactcgaagccttccgtcaggaagccttccagttcgcagtcgacaacggctacgatcacccggattacaccgattgggtctactccggcgtcaacaccaccaagcagggtgctgtctccgctaccgccgcaaccgctggcgataacgagtgagtctagcctctataggctgatcgcttgaagaaaaccccagaggattcgtcctctggggttttctgtttactcttcaccgtctgttcgcaacaccgtttcatgagatgcgtgtctgttaccgttcacgcattacaatggcacatggtgcgaaacagcgcagtcacacaccttaaaaacaacgaataggagcagacatcgtgagtctaaccagcgtcaccattatcagccctgaagcagcaaacggccgcaacgtcgtggcccttggcgttaccaaggcattcgcagctgccaagaagacggccgtgttccgtccggcggtttgtcgcaaggaaaccttcaccgacgttcttcttgaagcaagcaactcggggctgagccgtgaacaatccgtcggtgtttgcccgaagcgtgcacgcaccgacaaggaaggctcccgggccgatatcgtggccgcctacacggaagccatcgaaaccgcccagcctgaagccgtggttgttgtcggaacggacaaatccgccatcaacgacccgtccatctttgcgttcaatgctgacgtagccgctgatctcaagtccgtcgtgcttcttgccgtatgcaccatcaaccgcactccggaacaggtcctgggcactgtcgaggcgtcgaagaccatcatcgagaatgcaggcagcaaggtcgccggcgtgttcatcaccggatgcaaagacgaacaggtggaacccctcaaggaggagttcgcagcttacgaggtgccggtgtggacgttacccgccgttgattttgacgaggaagacgccgtgaccaaagccacggaggcattcgaggcgaatgtcaacgccgaagagcttatcgccgctgtcgaggctccattcgaggcgccgaccacgccatacgcattccagtacagtctgctgggcaaggccaaggcggacaagaaaaccatcgtgcttccggaaggatccgaagaccgcatcatcaaggcggccgactatctgcttgagcgtgatatcgtcgatctgatcatcgtcggagacagggaaggcattctcgcccgcggcgaggagcttggtctcaaatcccttgaaaaggcgcagttccaggccaaggacgacgaggaagtgctcgctccgatggtcgccaagctgtgcgaactgcgcgccaagaagggcatgaccgaggaacaggctcgcaagcagctcgccgacgacagctacttcggcaccatgcttgtggtgctcggcaaggctgacggtctggtttccggatccatcaactccacggccaacaccgtacgtccggccctgcaggtcattaagaccaagccgggaacttccctcgtgtccggtgcgtttctcatgtgcttcaaggaccgtgtcgcagtgttctccgattgcgccatcaacctgaacccgtccgctgagcagcttgcggaaatcgccatccagtccgccgaaacggcaaaggcgttcggcctcgatccgaaggtcggcatgctgtcgtattccacgctgggatccggcaagggaccggacgtcgatctcgtggaggaagcaaccgcactcgtgaaggagaaggctccggacctcgcggtcgtcggttccatccagttcgacgcggcttggtcgccgaccgttgcagccaccaaggccaagggcaacgatgtggctggccatgtcaatgtgttcgtgttcccggatctgtgcgcgggcaacatcgggtacaaggccgtccagcgttcctccggcgcggtggccgtcggtccggtgctgcagggcctgaaccgaccggtcaacgacctgagccgaggcgcaaccgtgcaggacatcatcaacacggttgccctgaccgccatcgaagcccagtaaaacgctattttgtagcaagcaaagagtaatctaaagtttggaaagtcgcgcaagcggcacatcgattaacacatggaggatgcccacaatggcgaaaaccgtccttgtcatcaattccggttccagctctatcaagtatcagctggttgatcttgaaaccggtgaaggtattgcttccggcctggtcgagaagatcggcgagccggttgacggccactacaagcacgagttcaacggcgagaagcatgagctggaagagccgatccacgaccacgagcagggtctgaagcgcgtgctcggcttcttcaacgagttcggcccgaagctggacgaggccggcatcgtggctgttggtcaccgcgtggtgcagggtggttccatcttcccgaacccggctctggtcaccgacaagaccatcaaccaggtcaaggacctcgccgtgctcgcgccgctgcacaacggtccggaagccaagggtgctgaagtcatgcgcgcgctcctgccggacgtcccgcagatcttcgtgttcgattcctccttcttcttccagctgccgaaggccgcaagcacctacgcgctgaacaaggaaatcgccgaccagtaccacatccgccgttacggcgcccacggcacctcccacgagttcatctcctccgtggtgccgagcgtcatcggtaagccggctgaaggcctcaagcagatcgtgctgcatatcggcaacggcgcttccgcctccgccgaagtttccggcaagccggtcgagacctccatgggcctgaccccgctcgaaggcctcatgatgggtggccgtaccggcgatatcgatccggccgtcgtcttccacctgatccgcaacgcccacatgaacgtggacgagctcgacgctctgttcaacaagcgttccggcatgatgggcatgaccggcttcggcgacctccgtgaggttcaccgtctggtcgccgaaggcaacgaggacgccaagctggctctcgacgtctacgtacaccgcatcgtcggctacatcggcaactacaccgctcagatgggcggcgtagacgtgatcaccttcaccgcaggcgtcggcgaaaacgatgacgtggtccgcaagatggtgtgcgacaagctcgccccgttcggcgtcaagctggacgaagagaagaacgccacccgttccaaggaaccgcgcatcatctccaccccggattccaagatcaccatctgcgtcattccgaccaacgaggagctggcaatcgcccgcaagtccgcggcaatcgcagaagcaggcgaagacacttacggcaacgtcttctccaagtgagcaaggagatcccgcagtcaaatgattgacgggaccgtatgaagaggaccgtacgttccattggaatcaaatccaatgccaatgggacgtatggtcctttcttgttcgaataatccttatgtttcaccgcttttaaggtttcgatcgccgaacgtttccaatcgtcccagacaatgactttccatatctgttcatggtccgcataatgggggaggggctggtagtacgatacgaaacgttgtgcctaacgcgcatacgtcgcatgttgagagaagcggttgattgttgtggtaagacgtcgttttgtcggtctgaatggcctcaagggcatcgccttgatcgcgatagtgttgtatcactgcgaccagggcactctgcggggcggattcctaggtgttgacatattcttcaccatttcaggttttctgattttctcgtcgttgctgaatcatattgattccggcaagggaataggtttcaaggaatactacctcaagcgtctgctcagaatatacccggcgctgattctgatgattcccgtcaccgtatcgttggcatggttcatcaaccaagacatgttggtggacattaacaaccagatagtgacggctatgctgggttgttacaactggtatgccatcggcagtggcgccagctatttctcgcagatgaatccagacatgttccgtcatctgtggttcatgtcggtgctgatgcagttctatctgttggctcctttgctgatctacctgcttcgaaaaattctggtacgttgggtgccggtggcggtacttgccggacttgccgtgtgcagtgcgctttccatgggattgcagtatcacccgggaaccgatccaaccagagtgtatttcggttcggacacacatgccatgggactttggctaggtgccatgctggcatggctgctgatgatcatacggcgtggcaacggtcgtccggaagaaacggcgatcatggaacgcgctcgtctggtctggagcaagatcggccctgcggcggcttttgtggcattactgattctgttatggatgatgcagcacgttgagcagggtcctgctgccttctatggagggattttcgcggcttcgctactttcagtggttctggtcgccggttccattcctttcggatcttggatgcaggatctgctggtgttcaaaccatttgatgtggccggccgatattcatacggcatttacctgtggcattggcctttatggttgttcaccaaggcgatgttcccccagtggggtgctcggcatctgggatggatgctgctaatcacactcgctcttaccgcatgttgtaccgccatgtcgtggaagttggtagaacagcccgtcgcccgtggcggatttatcgccatgattcgcccgctgccagaaaacggaatgtgggatgtaaccagatgctggattacgatcgccgtggtattgagtacatgcttgatgtccggatacgcggtagccaacgcaccaaagcagaccagtgtggaacgcgcgttggaagagaatgcgaaaatgctgaaagagcagcagggcatgcacctcgacttcgataggaagcatccgccagcgcccaagaaacccgcatacaccatgcctgacgggcagcagatggtcgcattcggtgactcggtgatgcttgcctccagtaaaggtttgcaatccgtttttcccggaatcactgttgatgcggaaacctcacgttcgatgaccaaggcattgggacttatagaccaagccaaaagccagccggaaggattgcgccaatgggtgctggtcggcttggctacgaattcagcggtgaccgatggccaactcaatgacatactgaacgacattggaccggatcatgtgcttgtgctgattaatgcgcatgcccccgtgtcttgggtccccggaacgaacgacgcgttgagcaacttcgcggccgcccattccgacaacgttgttctcgttgactgggacgctacgatttcggcgcatcctgatgagcttgccggagatggtattcaccctggcatgtccaatacgctgtacgcccaggctgtcaaggatgcgattgcgaactggatcaagcaagggcactgaaacatccttcttgcgaatcgcggcaaagcagttttgcgatgaatatgaggaatccccctgactcgtttgagcagggggattcctcataaccttttaggatctgaacggactcagtcttcctgatgctgcggagccgacagaaaatgctcttcactcggcagcagagcattcaacagcacggccacaacgaacgccacggcgatgcaattggatgcgaagatggactggaacagcggcgggaagttgacgaaaatgtcgccgacctgcgtgaaaccgataccgatggtgagactcaacgccgcaatggtgatgttgcgctgcgtatagccggcctcggaaatcatctggaagccagacaggatgatgttaccgaacatcatgatggtgcagccaccaagcacggcctgcggcagggaattgaacacttccgccacggcaggcacgaagctggctatcaccagaatcagaccaccggaaagaatcaccttacggttgacgaccttggtcatggcgaccaagccgatattctgtgcgaacgacgtcaacggcaagcagccgaacaggccggagacggaggagatgagaccgtcgcctgcaatggcgcccgcagtctccttatcggtaggctgacggtcgagaccaaccttggtgagcgcagcggtatcacccagcacctcaacggaagacacgacatacagcagggcgaaggagatgatcgcgcccggatcgaattcaagctggaacggcatgaaatgcggcacggacacaacctgcagattcgcgaaaccagagaaatcgaccttgcccatgaaaatcgcgacaacatagccgacaaccaagccgaacagcacggaaagctgcttggcagtacccttcatcagcagctggaacgccaagcaggcgaccagcgaaatcagaccgagcgtgagattctgccagcttccgaaatcctcagcgccggaaccgccgccgaaactggtggcaccaacggaaagcagtgagaaaccaatcgacgtaaccacaatcgcggatacgatcggcggcacgaagcgacgccaatacttggccgtcaaaccaagcgcaacctccaacaggccaccaagcacaaccgcgccggcgaccgcgccgtagccttggttctgggcgatcgacatggcagcagccacataggtgaaggaaatgccagtgaccatcggcaggcgggagccgatcagccacacgccatacagctgaaggcaggtgcccagacctgccaccagcagaccggcctgaataatcgtggcagactgctcggcactcatgttggcggcggaagccaccaagaaaatcggagccagattggccacgaacatcgccatgacatgctgcaggccgaacgggatgcccttccagaacgaaacaggcgcgtccaggctgctaagcgcttcaaaggaaacgcccttcttctcttctctcacaatgaatcctctcttattcatgctgcgatgagtaacaggttgtaatggtttctgatgcgcgcccgtgagatgcgacgatcaggagcggaattcgatggtaccggtttccggatccatcgactccacgattgccagggaatcaacgtcgtatcccgctgcgcgcagctcatcgccgccgccttggaaacccttctccaccgcgatgccgatgccctcgaccgtcgctccggcatcatgacacagattgatcaggcccttcagagccttgccgttggccaggaagtcatcaagcaacagcacatggtcgccctcgttgagatacctcttggacacgatgacggggaattccttctgcttggtgaaggagtagacggtggtggtgtactggtcgccatcgagattgatggactgcgccttcttggcgaacaccacaggcgcattgccgaaatgacgcgcggcaacacaggcgataccaatgccggaagcttcaatggtcaggatcttgttgatggttttaccggcaaaatgttccgcccaagcggcacccatgtggtcgaacaattcgacatcgcactggtggttgaggaaagcatccactttcagcacattacctggcttgacggtaccctgcaggcgaatgcgctcttcgagctccttcatgaatccccttagattgttggccgcataaggcggcgttgatgttgacatacggtgaaccgcatataaacgttcagcatacgcgcgtcaattgaccatgcgagtgttgcgctgacctgcatgtgtgatagacatgaatttcgcagtaatcgacttcgaatcttcatggaaagaggaaccggtggagcagaatatgggaccagtcctgtgcgatccgcaaagtctgatcaaggacctcaatccgcagcaaatggaagcggtgaagtactacggacaagccctgctcatcggagctggtgccggatccggtaagacccgcgtgctcaccagacgcatcgcatggctgctggcacacggtttttgggcgagcagcattctcgccatcacctttacgaacaaggccgcggccgaaatgcgcgaacgccttgcggccctcgtagggcctgaagccgaacacatgtggatctccaccttccattccgcgtgcgtgcgcatcctccgacgtgacggcaaggaaatcggtcttacctcaggattttccatttatgacacggctgattgcgaacgcttggtcaagctcatcagcggcgatttgaacatcgatacgaagcggtatacgccgcgcatgctattgggcaagatctcggattgcaagaattcgttgatttcatggcaggaccagctgaaaagcgtgaactgcgactacaagcccggccagcgcggatatcaggtttcggccggcgacgtcgacgagctggtcgccgtgatgtatgcggagtaccagtaccgtctggccatggcgaatgccgtggattttgacgatctgatcatgcgcaccgtcgaattgttccagcgttgcccacaggtgagcgaatattaccggcataagttccgttatattttcgtggacgagtatcaggacaccaaccatgcgcaatatgtgctcgtacgtgagctttccggcattgattcgggagaacagcccgatccacatatgcgaggagcaggccgtgtcggaccgtcttggattacggtggtgggcgattccgaccagtcgatttatgcgttccgaggcgcggatattcgtaatattcaggatttcgagcaggatttccctaacgcgaaaaccatcatgctcgaacagaattatcgttcgacgcagaccattctcgacgcagccaatgcggtgatcgcaagaaatgaaaatcgtaagccgaaaaaactgtggacggcacttggcgaaggcgacaaaatcgtcggatacgcggccgacaacgcgcaacaggaagccggatggatcgccaacgaaatcgcacgaatccacaacgaggaaggcgtggcgtatcgcgacatcgccatcatgtatcgagccaacgcgcaatcacgctcgctcgaagaggccatgatcaatgccaacctgccgtatcagctcgtcggcggcaccaaattctacgaacgcagggaaatcaaggatgcgctcgcgtatttgcaggccatcgtgaatcctgcggacaatgtgaacgttcggcgtatcctcaatgtgccgaagcgcggactgggcgttcgtgcggaaggactcgttgcctcgtatgctgatgcccatggcaccacttttttcgaagcgatcgaacatatggaacagatcgaaggcatgtccacgcgcacgacgaaaccgttgagtgcgttccgagacatgatgcatgagcttgcggcttttgcgaaggaccatgacacgaagccatccgaagtggttgccgaagtgcttgccaagagtgggattttggaagagctgcagcgctccgaggatccgcaggacgcttcccgcgtcgataatctttcccagctgcaatcagtggcggcggaattcgagcagaacacgccagacgccacattggcgggatttttggaaaccaccgcgttggtggccgattccgaccaattgccaggggagaacgaagattccggcaaggtgacgatgatgaccctgcataccgcaaagggtctggaatacccgtatgtgttcctgaccggcatggagcaaggcacattcccacaccagcgtgccatggaagacaccagcgaactggcagaggagcgccgtctcgcctacgtgggcatcactcgcgcgaagcgacgcctgtatgtgacacgcgcggccgtacgcgcgcaatgggggcaagccagcgacatgatgcccagtcagttcctcgatgagattccagacgaactgattgattggaaaagacgcgaagccggcgccgaacgcatgcgtgccagctggcaggatgacgacgacgagttcggcggctgggacgatgatgacgatttcggatcgatgtcattcggcggttcctcgtatggaaagtcggattatggttcctcatacggttccggctcgcggtggtctcgttcctcatacggatcgtcttcatatggggcagggcgctcgcagtacggcggcccggctacgcagggctcatcatcctcgtatggttccacatcccggcgctcgtgcggaggatcgggaaccggttcctcatacggctcgtatggttcgtatggctccggcaagtcaggagggaaatcgggcaaggtcaccacgcgacgtgtcaagccgaaaaacaagcctgtggatttaaccaaatcctcatccgcaagcccggccggtagccataatgatctgaacattgcagacgtgcatgtcggcgacaagcttacgcatgatcatttcgggttgggtacggtcattgaaacgcaggacaagggcatgaattcggtcattaccgttgattttggcaatggtgaggtcaagcgtctgctgttgcgtatggcacccattgaaatgctatgacggagatgaagaacggatgaaatctcctctgtagcacgaaaaggaggaaaaaacaagactttctttttcaaagagaccctgcaataatcggcggtgtttgtcttattttgagaggaagctatgaataagaaactgtacgcaggcatttcgcagatcgtgctcggcatcttgatcgccatcgcgccgcagaccttcgctcacgtatgcgcggtcaaagaaacgccgatggcatgtcattacacggctcaggccgcgctcggcatcggcatcgtgatcgtggcgcttggcattgtcggcctgttcgtatccgatcagacccgcgccggtcttgacctcgccaatgcggtgctcggcgtgctgaccatcgccgtgccgaccgtgctcatcggcgtgtgcaagggtgccatgatgcgctgccatatggtcaccttgccgacgctgatcgtgctcggcgtgctgctggctgtacttgcggcaatcgcggcatatctcgatctcaagccggcgaagcgcgcctgacccaatatgacgcaacacatcacccttggcgggttgcccctggtcaatctcaaacgcaaaccgtttcgtaccgcggcgctcaccatcgtcgtcgtcatgcttaccgtggccttctatggtggttcactgctgtccatgaaccttgaagccggcttgaacagcatgcaggaacgtatgggcgccgatctcatggtcacgccgcaaaacaccaaaaacgaagccgaagcgttgctgaccaacggatcggcaagcacgttctacttcaccaacgagatcaccgacgaagtggcaaaagccgacggcatcgacgaaatcacggaacaaacatatatctcatcgttggccgccgcatgctgcgacgagaaagtccagatcatcggattcaaccccgataccgacttcgtgatcactccttggatcgcatcgcagttcgacggcacgctccagcgcggccagatcgttgcaggagccagcatcagcgtgtcgggcaacaacacggtcaaactctatgggcacgaattccccgtggcggcgcaactcgccaataccggcacgtcgctcgacgattccgtgttcgtgaacatgcagaccgttcccgacgtggtcggatattccgccaaggtggggcatgccgccattccggaagaatatgccgacaaagccgtttccgccgtgctcatcaaggtcaaggacggttactccgcccagcaggtcgcttcgaacatcaccaaaacaacaggaatcaaaagcctcggatacgtatatccggggggcatcacagccacaacgaaatccaatctgaacgtgatcattcgctacgtgacccttttcgtcgcggtgttctgggtcatggggctgatcgtgctgcttgctgtgttctcgtccgccatgaacgaacgcaaacgtgaattcgccgcgtatcgcattcttggtgccaatcgttccactttggtcggcatcatcgtgaaggaatcggccatgatcggagctttgggcggtgtgataggcattgcggtcgcgtcgctggcgattttcccgttcagcacgcttatcggacggcagctgcagttgccgtatctgcaaaccaacatgtggaatgtgttggcattgatcgcagtgagtttcgtgttcgcggtgcttaccggactgctcgcctccgtggcgacggcggtgaaactttccgctcccgaaacctatctgactttgagagaaggtgaatgatggcggaaaacacggttctcgaagtacaagagctcactcgcgagttcacccgtcgcggcaaaccgttcgcagccgtggaccatgtggatttcaggctggaccaaggcgagttcgtggcgatcgtcggccgctcgggcaatggcaaaagcacattgttgaatctcatcaccggactgctgaaacccacatcgggctctatcgacttggacggcaatgacgtgacgcggttgaacgacaaacaaatgtcagtcgtacgcaatcggatcgtcggattcgtcacgcaaagccagacattgctgccgaatctcacggcactcgacaatgtgattcttccttccgtgctgtgcaacggcaaaacggcgcagcgcgatgttgagatacctgcggattcgtctgatgcgaaatcagtggaagaaaccgtatccgacgcattttccgaacagacggttgacgacggacttccggacgtcatcgcggcggctccggtatcgaaaacacacaacgatcccgttcagggccatgccatggaacgtgcgcacgcattgctgcgccgactgcaggtcgacgatttggcggaatgctacccgaaagagctttccggcggcgaaatgagacgcgtcagcatagcgcgagctctgatgaatggtccgaaacttctgatagcggacgaacccaccggagatctggatgccgaaagcactgccatcgtcatgcggctgctgcaggaagtggcgcacgacggcaccgcagtgttgatggtcacccatgatccggatgccttgacgtatgtggatcgaatctatcgcatggacaggggagtgctggctgaagcatagcggcgccatgatggcatgacatgccgaagagggcgaaacgacgagctcgtcccgccctcatgtgtattattaacgattggtgtgcgcccgcaagggagcataccgtctggagtcttagcccatcagtgggtcggcgaccgatacgagctgtttacggcacgtgttcaagtcgttcgtgcgcatgcacgaagaagcactggagaggctggctcagcgcatatcggaaaccggtgtgcgctccgttcagacaacgacagaacaaacaaaggattaaaccaatgacgaacgttcagcgttctcgccgtcaggtgcgcctttcccgcgccctcggcatcgctctgacccctaaggctcagcgcatcttcgaaaagcgtccgtacgctccgggtgagcacggccgcacccgccgtcgcactgagtccgattacgcagtgcgtctgcgcgaaaagcagcgtcttcgcgctcagtatggcatctctgagaagcagcttcgcgccgcttacgagaagggcacccacaccgccggccagaccggtaacgccatgctgatcgatctcgagacccgtctcgacgccctggtcctgcgtgcaggcttcgcccgcaccaccgctcaggcacgtcagttcgtggttcaccgccacatcctcgttgacggcaacatcgtcgaccgcccgtcctaccgcgtcaagcctggccagaccattcaggtcaaggccaagagccagaccatggttccgttccagattgcggccgaaggcactcaccgcgatgtgctgccgccggttccgggctatctggacgtcaacctgccttccctgaaggccaccctgactcgcaagcctgaagccgaggaaatcccggtgcaggtcaacatccagtacgtggtcgaattctacgcccgctgatctggatctacatactgtaagagcatacagtataaggacatacagcaagagcctcgcaatcgtcaggattgcgaggctcttcgctatctcaagcgcatgtgcggcctttttaagcaacgggaagccttcagtcgccgatgatgccgcctactatgccgctcacaatcgtcataacaagtgagccaagcacagaccatgcgaatccgtcaatagtgacgcccacagagaaaaacgacagcgccaaccatgacgcaagctgcatgaacagccaattgatcaccagtgcgaccagtccgaacgaaataatcgagaacggcaacgctatgacatggataatcggctttatggaagcattgataagcgccatgaacaaggcgaacgccgcgatgccaagcacagggggctcgccaatggcgtgcatgccgggcagaaccgcaaccataacgcccgccgcgacggtaagaattagccaacgtgaaataaaatgacccataacaacatcgtatagcacggatttgctcaaaccgtgagggtagcatggaacccatgttgcttcatcttcatcttgtccgacacgggcagacgtttttcaaccgatataacaggttgcagggctggtctaattctccattgacggaatctggcatcgccgacgcagacaaagccgcaaacaaactgaaggagttcgattttgccgcggcatattgctccgacaccacgcgtgcgcaaatgacagcccagcgcatcctcgacgtgaatgaggccgcaggacacacccgcccccaactggtcagtgacatgcatttccgcgaacagttctacggctatttcgaaggccaggatatgggcgtggcgtggaccgccgcgggagggccgcacggtgcgaagaactacaacgacatcgtcgcaaagttcggtcttggtgcgacccgcgacttccttaaggaagcggatccattccacgatgccgagtccgacgtggaatattggtcgagagtcgaggagggattcgcgctgatcgcttcgaatcctgcgctgagggacagtgatgacgtgttgcagatttcccacggcaacacgctgctgagccttatgcaccgtttcgcgccggaaggctatgacctcagcgaacgccctgcgaacggatcggtcaccacgctcgatttcgacaccagtaagcctatcgctgaagcggtaaccgtcgtatcgtataaccagtgaccggcggacgaaacttgccttaggtctgggctttttactactgttatgcgcgtgttgtgttcgcgggcaaccgtgggactgaaaagaggtacaagatgggtgttggagaaatcgccggtctgattgcggcaatcgctttcgcgattcttgccggtttcatgatctacccgttgattcgtctcggcaaactgttcgaccagctcgccgagacagtcaaagaaacgggagatcatgcgattcctgcgcttgatgagagtgtgaccacggtgcagcaggtcaacaagtcgctggaagacgtcaacaagatttccgcagcggcttccacaaccgccaataatgtcagcgccctgaccgatctgtatggatccttcttgggcaagccggttatcaaggttgcttccgctgcatatgccctgaaaaccaccgcgcagtccttcatgaacaagaagaacgtcaacagcaataacaagggggagtgatgttcaagcgtctcttctggatctccattggtgtgggcatcggtgcggtggcagtgaccaaagcacaggcgtacgtcaaggccaacacccctgatgcggctcgacaatttctgttcgggccggatcaagatcatgtcgccgtgcgcacccttgaaggtttgttcaatgagttcaacgaaacgcgtcgagcccgcgaggctgaacttaataccaaatacgcggataagatcagctgatcttattcccgtaacgtacgttcggacaacaatcacgaattcgtttgaaaggcaccaggcctttcagcaaaaaaggagcttaatctcatatgcgcacttctgaaatcgcgaagcgctatcttgattatttcgaaaagcacggccatcttatcgtgccttcggcatcgctgatctctccaaacccgaccaccctgttcaccatcgcaggcatggtcccgttcatcccgtacctcatgggcgagcagactccgccgaagagccgcatggcatccaatcagaagtgcgtgcgtaccttggacattgacgaggtcggcaaaaccacccgtcacggcacgttcttccagatgctgggcaatttctcctttggtgattacttcaaggaagaagccatccactatgcgtatgagctgctgaccaccccgcaagacaagggcggctacggcttcgatccggagaagctgtggatgaccaccttcaccgacgacgaggaagctcgttcaatgtggaagaacgagggcgttgaccccgaacacatccagatcatgggcatggaggacaacttctggaccaccggcggccctggccctggcggtccgtgctccgagatctacgtggatcgcggacctgaatacggtgtggaaggcggcccgatcgccgacgagaaccgttacatcgaaatctgggatctcgtgttcgaaaactacgaggtcgacaacgtcaagtccaagaccgacctgcacatcgttggcgagctcgagaacaagaacatcgataccggtgccggcttggagcgtcttgcctatctgatgcagggtaagcagaacatctatgagaccgacgaggtcttcccggtcatcgaagccgcccagaagctgtccggccgcacgtatggcgatgacgaagccatggatgtgcgtttccgcatcgtggctgaccatgtgcgttctgcattgatgatcatgtccgatggcgtacgtccgtccaacaacggtcgcggctacgtgctgcgccgactgcttcgccgcacagtcaaggccatgcgcgagctcggcgtgaccgatccggtcatgccgaccctgctgccgacctccaaggcagctatggagccgagctatccggaactcaacgacaccttccacgatgtgtccgaagccgcatatggtgaagaggacgcgttccgtcgcacgctggaatccggcaccgagatttttgacctcgctgtggccaaggccaaggaatccggatccgacgccgtttccggcgaagatgcgttcaagctgcacgacacctacggcttcccgattgagatcaccctcgaaatggccgccgatcagggcgtcaaggtcgatgaggcgaagttccgcgagctcatggccgagcagaagagccgtgcccgtgcagatgccctgaagaagcgtcacaatgtggatctgtctgtctatgacgatttcaagaagacgctggtccagcccatcgacttccttggttacaccgacatgtccgcccgcgccaaggtgctgggcatcatgcaggaaggcaagggctccgtccccgcagtcaccggtccggccaccatcgaagtcattctcgaccgcactccgttctatgcgcaggccggtggccagctcgccgatcagggcgagatcctttccgacgatggtgctgtgctcgaagtcgacgatgtgcagaagccgatcaaggacctcatcgtgcaccagtgccgcctgaccgaaggcacgttggttgtcggcgccgaagtcaacgccaacatcgaccttgaccgacgcggtgccatcgcccgcgcgcataccgcgacccacatggtgcacaaggcgctgcgtgaggagcttggcccgcaggccacccagcgcggctctgaagacgcgccgaaccgtttgcgtttcgacttccaatggtccagcgccccgagcaaggatgcgatgaactccgtcgaggcgcgtgtcaacgagaagctgcgcgaaaaccttgccgtcaccacgcaggagatgaagttcgacgacgccatcgccttgggtgccatgcacctgttcggcgagaagtatggcgacgtcgtgcgcgtggtctccatcggcgaagatggatggagccgtgagctttgtggtggtacccatatcgaccatgtgggcaagatcggtgccatcaacatcatgtccgaagcctccatcggctccggcgtgcgtcgtgtcgatgcggttgtgggcgaaagcgcttatgagttcaacgctcgcgagcatgcgctggtctcacagctttccgacatggtcaatgcccgtccggacgagcttgccgaccgtgtgaacgcactgcttgccaggctcaaggaatccgaccgtcgtcttgcgaccatgtacgaatcccagcttgcggcttccgtgcctgctttggtttccgaaaccaaggcatcccaggctccggtcaaggtggcagcgaagaacgtcgagcacttcggctctttcgacgcgctgcgcaagaccgtgctggatgtgcgcggacagcttggtgaggaattcccggttgtggtggctctcgccggtgtgaacgaggaaggcaagcctatggttgccgtggccactaacgaggctgcacgcaagcagggtatcaaggccggcgatttggttcgtggcgcttccaagatccttggcggtggtggcggcggcaagccggacttcgcccagggtggcggcgcggatgccaccaagatcaatgaggcgcttgaggctttggccaatcaggccatgaagggctgaaccaccaagcatggtttggcttggcattgatttaggtgatgccagggttggactcgcactgtctgatcctggcatcactcttgcacaccccgcaggcaatattcaggtctacggggattcgttccgtgcattggacgaggtcgtggacgtcatcgaagacgaatcggtcgaccatgtggtagtcggattgccgttgctactaagcggagaagaaggcaaaagcgcgaaaaaagcacggcgatggactgttaatcttgagaagagactgcgtgtcgcagtagatgatgagaactatgcgctaaaggaagtgccgtccatcgaattggtggatgagcgtctaactacggtgactgcacatcatcagctattcgatgcgcaggtcggtggacgaaagcaccgtccgatggtcgaccagcagtctgcagtggtgatattgcagacggccatcgaccgaagagagagaccagaggagagaggcctgtgactgataatctcgacgattttttctccgataacgcgcaatgggtgaattcgtcggatgatgcatccttcgtttcggcaatgcctccgcaaccaccgaaatcacgtaaggacatgcgtcgtcaccgtgagcagaagcgtcgtcgccgctatatcaccattatcgccgctctggtggtgatcgtgctgatcggtgtcggcggattcttcggcgtgcgcgcgctgaaacattggaaggccgtgaacgaagcgaattctcaaagccaaatcgaggattacacgggcccaggcgataaaggcgtgacgtttgtcgtggaatccgggcagggagccgcggaaatcgcggacaaccttgttaaagctaaaatcgtcaaatccgcagccgctttcacttccgcagtaagcggagctggcgccacgttgtatccgggatcatacgcattgaggacgcatatgagggcgtccgatgtggtcaaggtgctttctgaccaaagccaggccggcggttttgccgaagtgcgtgcgggtgaacgtgtgtcggacgtcatcgaaaatgcggcgagtgtgtccggcttggatgtttcacagttccaagccgtgatggacggtggcggtgctggaatccttcctgacgaggccggcggcaaattcgagggatggcttgaaccaggcagctacaatgtgcaaaacaagtcagcggaagacatcatcaaggaaatggtcgacgcgcgagtgagcaaactcgattccttgggcgtacctacaggcagcgaacgtgagcgcatcctgaatatcgcatccatcgcggaggcggaagtcggcagcgaaaaatactacggccaggtggcaagagtgattctcaaccgtcttgacgccgatatggctctcggcatggataccacggtcgcctacggtcttggtatttccgcaagccagttgaccgatgaccagttgggcgatgacagcaacgcgtacaacaccagaatccacaagggactgccgcccacgccaatcagcaaccctggagatggcgcgatcacagcagccgtcaatcctccggacggcaagtggctgtactttgtcaccacaaacctgcagaccggcgaaacgaaattcgtggaaaccgaagatgagttctggcagattcgcgacgagtacaagaacaacaacgagaacgcgaactgatctcagaataaaacgccaatcgcaatgcctatcgccccagctgccacaagcgctggggcgaacggcgttttaccggcatatgcggtatgcttctgcggatcgaaacgtgtccacaaaacgagccataacaagccgaccacaccaatcgcaagccaccaaaacaccacggcgaacagaccgaacatgccgactgccaatcccatcagcaaggtggcggtgacatcgccaaaacccaatgaaccaggtttcaccaaagcgagcgcgcattgcagtacggccgacagtacggcgaagagtattgcctgcaatgccaggtacagagtgttgatggaaagcgcgtatatgaggtttacgatgatttgcgctgtgcatccggtggcgatccaggcgcgtggaatgcggcgtgaacggatgtcttcaacgctgatggccagtccacaaagcagacttggcaggcaaatcatataccacataccgttaagatagtccactagttgcattcgtgagaaaaggagttggcatgttgcgttggcagacagcaggcgagtcgcatggtgaggcgcttgtcgccatgattgagggattgcccgcgggcgttcatatcaccacggaggatattgttggcgcgttggcgcgtcgtcgtcttgggtatggtcgtggcgcgcgtatgaagttcgagcaggacaaggttcgtatgctgactggtgtgcgttttggtgagacgattggttctccggtggccatcgagatcgccaacaccgagtggccgaagtggactgaggtgatgagtgcggatccgcttgatcatgagcttgctcgtgagggccgcaatgccccgttgtctcgcccgcgtccggggcatgcggatttgactggcatgcgtaagtatggttttgatgatgctcgtccggtgttggagcgttcttccgcgcgtgagacggcttcgcgtgtggcgttgggtgaggttgccaagcagttcttggagcaggcgttcggtattcgtaccgtttcgcatgtgctttccattggtggcgcaggtattaccgatccgcagcaggccacgcttcccaagccggaggatcttgaggcgttggacgcttctccggtgcgcactcttgacaagaatgcggaagagcggatgattgcccgtattgatgaggcgaaggagaacgccgatacgttgggcggtgtgatcgaggttgtggtgtacggcgttcccgcaggcgtgggcacgtatgttgaatcggatcgtcgtcttgatgctgctcttgccagtgcggtgatgggtattcaggccatcaagggcgtggagatcggtgatggtttccttgaggccatgcgtccgggttctcaggctcatgacgaaatggtggtgggcgatgacggccgtattgcgcgtctaagcaaccgtgcgggtggtatcgagggtggcatgtcgaatgggcagccgatcgtcgtacgtgcggcgatgaagccgattccttccattccgaaggcgttgcgtaccgtcgatgtgaccacgggcgagccggcgcaggccattaaccagcgttccgacaatactgcggttccggcggcggctgttgttgccgaggcgatggtgcgtttgaccatcgcgcagtatgtgcttgagaagtttggcggcgattgcgttgccgaaaccaagcgtaacgccgagcagtacgttgcctcatggcctgagcatatgaggtgattcgtctatgagtggtatgcgtaggcctgtcgccgtgatcatcggcatgatgggggcgggcaagactcgtgtcggcaaggaagtggcgcagatgatgaatctgccgttcgccgatgcggacaatgagattgagcatgatgccggaatgcggattcccgagtacttcgaaaagtatggggaaccggaattccggaggctggaaagcgacgtcgtgcttgatatgctcgaggatttcgacggtatcttttccttgggtgggggagcgccgatgacgccttccattcaggaaggattggcgcagtatatcgcggacggtggcaaggtcgtgtatcttatggccgatcctgaggaagccatggagcgggcaaatcgcggtggaggccgtccgatgcttaatggcgatgccaatgagcgttggaagaagctctacaaggaacgtgacccggtgttcaggagcgtggcgaacgtgcatgtgggcacgcgtggccagtctccccaagccgcggcgagaaagctgatggaaatgattgatcaacgtatagtccatgtcaccggttccaccatcgaaccatacgatgttcgtatcggagagggtgtgatgggccagcttgcgcaggtgttgggaagcaagcctgccaaagtggcgcttatccacacccagccggtgcagcgtcattcggaccgtgcgcgtactttgttgcgtcaggcgggctatgatgcgtacgatattgtgattcccgacgcggaggccggcaagaccattgaagtggccaatggtatctggcagcgtttgggggatgagggtttcactcgttctgacgcgatcgtcggccttggtggcggcgcggcaaccgatttggcggggtttgtggctgccacatggatgcgtggcattcgctacgtgaactgcccgacgtcgttgctggccatggttgacgcttcgaccggcggtaaaaccggcatcaatacccctcaggggaagaacctggtcggctctttctatacgcctgccggagtgcttgccgatctgaaatcgcttgcgtcactgccgaacgacatcttcatcgaaggattgggcgaggtcgccaagtccggtttcatcatggacccggagattctgcagatcctcgaggaccatgccggtgaattgcgtgccttcgacgggtcgacgttcttggattccggcctgaaggatgtggtcgcggagctgatcgaacataccgtgagcgtgaaggcctaccatgtgtccgctgaccttaaagaggcgggattgcgcgaattcctcaactatgggcatacgctcggtcatgccatcgagaagcttgagcatttccgctggcgtcatggtaatgcggtggcggtcggttgcgtgtatgcggccgaactgtcgcatcttctggggtacatcgatcaggatctcgtggactatcatcgttcgttgttgggatctctggggctgcctacgtcctggaacaatggcacatgggatgatgtgctcgcattgatgcaccgggataagaaggctcgcggcaataagcttcgtttcgtggtgcttgagggcgtcggccatccgattcatcttgaggatccgcctgcggacgccgttgaagaggcgttccgtcgtattcagcagtaaacaaggtagggaagtggaatatgactaaagtagtggtcgtcaatgggccgaatcttggccgtcttggcgtgcgtcagcctgacgtgtatggcaagcaggatcttgaaaccctgcgtaccctgtgcgcgcagtggggcagcgagcttggtcttgacgtggaagtgcgtcaaagcgatgacgaagccgagatgatcggctggatgcaccaggccgccgacgagaagaccccggtcgtgatgaatccggcggctttcacccattactcctacggtctggccgatgccgcgcatatggtgatcgatgagggattgccgctgatggaggttcacatctccaatccatccgcacgcgacgaatttcgcaagcgttccgtgatctcgccagtagcgacgggcactatcaccggtatggggttctatggctacaagctggcgttggatgcggtggcgcatctgttggaatcgaagtgatgattttccgatttccccttgagatagtctcggaggaactatgaatgccggatgctcttgatgggcatccggtttttacatagcattgcattcgtttgcagaaaaagctgcaacaatcgcaaatatgattgccgttttgcgcaacacaatgaattgttgctgaaagcattttctttcgcttgtccttcttttccgtatattgcaatcggtcacgctgtttcattgcgatgcgcagcatctactgtacgatgaaccccgatctagggtgcaaacgtatgcacattcatcgcagagtgtgtcttagatgatccgcaggtaacgcggatgaccatggcgcatacgttgtcgaagggcggaacctgccatgggggccggaattcgatctcaacgatgagaacggagaacaatggtcgttcagcgaatgaatcggccggctagccgtgcggtggccataggcgtcgccgccgccatggcgtgcgccaccttggtggcggtaccgcatatggctcaggctcagcccgaggcgcaaacgaatgcgaagaaagacgtgcaggtcatcgccttccagcagacatggaacacggtcgccaaggaatgcacgagcacatacggtccggaagacgtggcatacgtcgaggtgtcgccgccgcaggaatccatccaaggcacgcaatggtggacgtcctaccagccggtaagctacaagctcgattccaagctcggcacggaagccgaattcaaaaacatgatcaagcagtgcaatgccgtcggcgttgacatcatcgccgacgttgtgctgaaccagaccaccggtgccgacgtggccgacggcaagcagaccggcgtcgcaggaaccgaatacaacggttcgaccggcgactacccgggatttgccaccgaacagtatccggaaggcatcacggcctccgacttccacagctgctccaagaacatctccaactacgccaaccagcaggaagtccagggatgccgcctgagctccatgtgggacttcgactccgagagcgaaaaggtccaggatattcaatctgactatcttgccgccctgtggaatgctggtgttcgcggcttccgtatggatgccgtcaagcacatccacacggacagcatgaaggccatcaaggagaagttcgcaaagaagatcggcgtgaatgccgacagcatctactggatccaggaggtcatcgggaactcctccgaagccgcgggcatccagccgagcaactacgtgcaaaacggcacggtgaccgaattcggcttcaagtccgaaatgaaccagaccttcaaagacaagatcgcaaacctcaagggacttaatgagcggttgagcaaggatctcgcctccgaagacgccaacgtgttcgtcaccaactgggacaccgcgcgcaacgagggcgccctgacctacaaggacggtgccaagtatcagctggccaacgcattcatgcttgcctacgactacggcacgccgcgtctgctttccgactacaagtgggacgagaacgacaacggcgcaccgggagccaccgccacatccgttccggacgtgaacatggacgaggtctgttccaccaacagctccgactggaactgcgagcagcgctggacctccacccgaggcatgatcgccttccgcaactacgtcaacggcaccaaggtcgccgactggcaggatgacggcggcgacaacatcgccttctcccgcggggataagggcttcatcgccatcaacaacggcaagaccgacaaggacgcctcctacacgacatcgctcgccgacggcgaatactgcaacgtgtacgccaccatggactgctcccagactgtaagcgtcaagaacggcaaggtcgagaccacggtaccggcgcattccgccatcgcactgtatgcaggcgccaccaaggacagccacccggcatccagcgtggccaacgacccgtccgatcctgacgtgaaccaggaaggggacgagaccctgcccgacgacagaagcgtcaccatctactacaagcccgccgattccagctggaagagcccgaaggtccactacggtcttggcgatgactggaaccagccggaagccgacatgaccctcgacgagcaggggtactatcgcgccaccatcgacaccaggggcaagaagatcgacttcgtgtttcacgataccggcaccgaccagtgggagaacccgaagggcggcggcaactaccacgccaacgcgggcatcacgcacgtgggtgtggccgatcaggccgcgaccgtgggtaatccggaatccgtcaacggccagacccgactcgtcgtgcactacaagccagccagcgattccgataatcgcggcgtgtacgtgtggggcacagacgctggcggctcgagcctctcggcagtcaaccatcccttcaccggagctgactgctggggcaaggtggctacgctgaccttcggcggcaagttcgacaagttcggcttcatcgtcaccaccgcagactggaacaagtacggtggcgaccgtagcgccacggtgaacgccgacggcacagccgaagtgtggatcgacggcaccaaatatgaggatcaaggcgaatcgaccaccgtcgaaaccctcgactccgctccgagcgactacgaatgcaagaccaacaccgttaccgtgaaggtccactacaaccgtgatgacggcctgtactacaacgccgaagacacctcggtcaccgttccccagtgggacatctggacctgggcttccaattggaacggcggagccgccaccttcaccacccacgatgactggggcgaggtcgcggaatactccttcgccaactacacctactacaacgtcgacggagcctccgacatcggcatactgcgccgttacggaaaggatgcgtggaaggccaaggacccggatgacgccgattacaagatcccgtcaaacgccttggtgttcaacgaatcggacggcaccgcatcggccgaagtgtggctgatgggcggcgacgccaccgtgtattcctcacgtccatcgttgggagcgtccatgaagtccgttgaaatctccgacgtcaacaagctgaccgcaagactgtccaaaaaggtcacttcggatgagcttgaaggcaaggtctccgtcactgacgccgacggcaaggctgtagatgtcaagaacatcaagaccgacggcaccaaggtgatcatcaccacggccaaggatcttgacgtgcgaggcaagtacaccgtcgaagttaagggcttcggttcgcaggacgccattgcgggctcggtggtgcgtacggatgccttcgacaagaagtacgcctatgacggcgacgatctgggcgccacttacacgagcgcgaagaccggattcaaggtgtgggctccaaccgccaccaaggttgagcttgtcacctaccagtccgacgatgtgaatgccgaagtcgacaagaccattgacatggcctctgaagacaagggtatgtggagcgccctggtgaagaaccttgctagcggcacggcctactcctacaagctcaccttcgcggacggcacggtgaacgtctccgccgacccgtacgcgaccgctgcggtcgccaacggcgaacgttccgtggtgctctccagcgaagacatgggctccgcaggcgaccgcatgccggaattcggcaagaccactgacgccaccatcgccgaaatgaacattcgcgacttctccatcaacccgaattccggaatctcagccgacaagcagggcaagtatctgggtgttgtggaatccggaacgaagacggcgaacggcgccacctccggtcttgactatctcaagcagttgggcgtcagccacgtgcagatcatgccgatgtacgactacggttccgttgatgagaccggcgatctgagctacaacgcgcaaggtgcgcagaactggggctacgatccggagaactacaacgtgccggaaggctcgtattcctccgatccatccgaccccgcctctcgcgtcaccgaaatgaagcagatggtcaagggactgcacgagaacgacattcgcgtgatcatggatgtggtgtacaaccacgtctacaatgccgccaaccactcgttcaacaagaccgttcccggctactacttccgttatgatgacaacggttccctggtcaacaactccggctgcggcaacgatacggcctccgagcgcaagatgatgcgcaagtacatcgtcgattcggtgacgtattgggcgaagaactacaacgtcgacggcttccgattcgatctcatgggtctgatcgacaccgaaacgatgaaggaagtgcgtgcagcgctcgacgagatcgacccgtccatcatcatcctcggcgaaggctgggatatgaacaccaccatggacgagggcgagatgaccatccagccgaacgcgtaccaagtcgcgtccgacggcacgaacaacggcatcgcgttcttcaacgattccgtgcgtgacggcttgaagggatccgtgttctccgacaccgacaccggtttcgtttccggcaaggccgaccaggagagcctgattgcccacaacgtgctcggctgccagtacgacgagaacgcgaccacgacctgctggaacggcaacgcgcaggatcactacgccgatgccggacaggtggtcaactatgccgaaatccacgacaacatgaccctgtacgacaagctcaggaagtccgtctcgacggatgacgacgccacgaccgtggcacgtgccaagcttgccgactccgtcgtgtatctgtcggaaggcatccccgcgatccagctcggccaagagttcctgcgcaccaagggcggagacggcaacagctacaacacgggcgacgcggtgaacgccatcgattgggaccgcaccacccagtacgccgattccgtcgactacgtcaagggcctgatcaagctgcgcaagcagatcaacgcgctgcgtctgaccgactacaacgacatcaacgccaacgtgacgatgctcaagtccgctgacggcgtcgtggcctaccaggccgagcagtccgacggcacctacgtggtgatcttcaacgccaacgcagacaagaccgcgatcgaaggcttggcaaacggctcctaccaagtgcttgcagccgacggcaaggtctactccgatgatgctatcgccaatgtcgatctcgccgaaggggcctcgtacgaagcgggcgcactgtctgccactgtgttgaaactcgacagcagcaccaagcccgataccgacagcgcgcctgtcatcaagggtctggtggcttccgacagcgtgactctgggatcaaagttcgatccgatgtccggcgtcagcgcatgggatgaggttgacggcgatctgaccgacaagatcacggtcgaaggttcggtcgatacctctaaggaaggcgaatacacgctcgtgtactcggtgaccaacagcaggggcaagaccgccaccttcacgcgcacggtaaccgtgcacaaacccgcggtccagccagcttccgacaagaagagcgatgctgtgcaaagcccgaatactggttccgccatcaccggtttcgcactggccgcggtggctcttgccatcgcatccgtgttcgcgttcgcggcctcccgcagaaaggaagactgatctcataagccaatgattgactgaatgtatctcctattcctgctaggcggggccatcaaggcaatgatggccccgcctttttgtattgaaggaaacacgccgcgtctcatgccgctgatagactgaagttccatggttagaagacaacatggcaattctcaagagcacgttaccaagcatattttcgtcaccggtggcgtcgtttcctctctcggcaaaggcctgaccgcctcctccctcggccgcctgcttcgtagccgcggcatcaaggttttgcagcagaagctcgatccgtacatcaacgtggatccgggcacgatgaatccattccagcatggtgaagtctatgtcaccgaagacggtgccgaaaccgatctcgacatcggccactatgagcgtttccttgacgtgtacctgagccagaaggcaaacgtcaccaccggccagatctaccaggaagtgctgcgcaaggaacgcgccggcgaataccttggacaatgcgtgcaggtcatcccgcacatcaccaacgaaatcaagtcccgcatgcgtgcgcaggcgtccgatgacgtcgacgtgatcatcaccgaaatcggtggcaccgtcggcgacatcgaatcccagccgttcctggaggccgcgcgtgaggtccgccgcgatctgggcgccgagaactgcatgttcgtgcacgtctccttggtaccgtacattgccgccgcccatgagctcaagaccaagccgacccagcactccgtcatgatgctgcgtcagctgggcatctccccggacgcgctggtgcttcgttccgaccgcccgctgaaccagtccatcaaggacaagatctccctgatgtgcgacgtggattccgaaggcgtggtcaactgtgtggacgccccgagcatctatgacgtgccgaagaccctgttcgacgaaggcctcgacgcctatgtcgtgcgcgagctcggcctgccgttccacgatgtcgattgggacgagtgggaggacctgctggagcgtgtgcaccacccgaagcatgaggtgaacatcgccatcgtcggcaagtacatcgatttgccggatgcctacctgtccgtcactgaagccatcaaggccggtggtttcgccaactatgccaaggtgaacgtcaagtgggtcgccgccgataagtgcgagaccgaggagggcgcggccgccgcgctcgaccaggtcgacggcatcgtcgttcccggaggcttcggcatccgtggcatcgacggcaagatcggtgccctgaagttcgcccgtgagaacaagctgccggccctcggcctgtgcctcggcctgcagtccatggtcatcgaatacgcccgccacgtcctcggcttggaggacgcgaactccaccgagttcgagcccgattgcgcgaccccagtcatcgcaaccatggaggagcagaaagacatcgtcgccggcaatggtgacatgggacacaccatgcgtcttggctcctatccggctgagcttgaagaaggttccatcgtcgcggaactgtacggcaccacgcatgtcactgaacgtcatcgtcaccgttacgaagtgaacgtggcatataaggaccgtctgcgtgaagcgggtctgcgcatttccggccagagtccggacggcgaactcaccgagttcgtcgagcttcctcgcgaggtgcacccgttctatgtgtccactcaggctcatcctgagttcaagtcccgcccgaccaagccgcacccgctgttcgcaggtctggtcaaggccgctctggaccaccagcaggagcgctaaatcgacgaattgtgattaacgtcggataacccgatatgcaacatggtcatgagtccaaaggagttcatggccatgttgcataataagggcttggccttgaattatcaacaagacgtattcgtaatgaaaaacctttacgagggagcatgagcttgaacgatatggattctccggaaagcggcaacggtaagttcgccttcccgaacatgggcgatgaaccaaaagtcatctcgcaggtgagcttggattcgtttgccgaaacggccgatcccattgatgatggtgcagcgttgactgtgaatgccagcaagaagcgccacctgttgtggctgtggattgttcttgcggtgatgcttcttctcggtgccgtggccggcggcggatactggttcttccagtcacatgcgttgccaggtgtcacgctctggggcaagtccatgacaggacaatcccgagatcatatcatccaagagatttccgatacggcggaatcattaacggttcccgtttcctatgagggaacgagtaagaaagtcacgttgaaggatcttggcgtcgccattgacgcggaatccatcgccgaaaatgtgatgaacgcgaaacgtgacgattccttctttcagaagtatgcattctggacccgtgaggatgtcgacgtcgagtctttcgatgattctcgagtcagcgcccagacggtaggtgacatgttgggagtgcagtccgtgtccgccaccaacccgtcgctacagctcaacgcggatggtaccgctttcgatgtgacgccaggtcagcaggggactggtatcgatgtgacggatatcgtcaaagaagccaagaacgtgcttgagtcctttggcaagcagaccgctcaaatggtgactcttaaaaataaggttactgatcccgtcatcacggatgaccaagccaacgaggccaaggcttctgctgacgcgtggatagcgaagccggtggctatcaagatcggcgaccataaagtggcggaattcggtgcgcagtccattgcatcggccatcacgcttggaccggatagtgagaagctcggcgataatcaaacccgaaatggctctttgattatcgatggtgacaaattgcagcaatactataacgattccatcaaatcgaacttccatgctgatcgagttgacggtgatgtcatcgttaatagtgtcggtgatgtgctgcaaaccaatgtagctgggcatgatggtataaccgttactgatggtagcgacaccaatgttggccgtgatgccgctgaggcgtttgccaaaggttctgattcagtaagtattcaaggcacttgcgacccacagaatgagaaaaaaaccacgcgtaccgtggtagtcagcttgtcttcgcataccgttacagccattgaaaatgggcagaccgtccgtgtcatgcatatgtctgccggtcagggcaatgattatcagacgggccagtgccagccgagcggcgacttgtgcacgccaacctactgcgatccgaactcctacgacaactgcacgcctgacggtgacttcaaagtgtggctcaagtaccagtcccaagatatgagcggcacccttaccctatcggatggaaacaccgagaagtgggatgtcaaggatgttggattcgtcaactatttctcgaaaacaggttgcgcgattcatcgcatcgccactcaaagtgcgtttaacgacagcagtattcaggctatggggaagaacacgtcccatggttgcgtcggcgtcggctgggatcaggctgaatggttctacaattggtgcctgatgggaacgacggttcacgttcaggcctgatatgcgggctaacggcagaaagacgcaaaggcggaagactgaatgttcggtttccgcctttacgctatgtaagataaatcacgacaaatcattgccgaatagcgaaaggggcgctagtgtttagccccacgttctgttaggttgtcataggtacaaacgagtgattggaggcagcgtacggtggcagagaaccaagcgcccaacgccgcggctgacgtggagatgagccagtatgtggctgatcgcacgcgagtgaatgaagacaagatcaagcaggatgacgagatcatccagcagttcggcgactatacgtacggatggcatgacacggatttcgccggagaagcggcaaaaaaaggcattgacgagaatgtcgtgcgcgctatttccgcagataagaacgagccggaatggatgctggaaaagcgattggaaggctatcgcgatttcatcaaccgtccgatgcctcaatggggtgtcgatctgaaggatttcgacgccgacgatttcaagtattacgtcaagccgatcgacaagcaggccacgacttgggaggaattgcctgacgagatccgtgcgacgtatgacaagctcggtattcccgaagcggaaaaaagccgtcttgtctccggcatcgcggcacagtacgaatccgaggtcatctacaactcaatccagaaggatcttgaagaccaaggcgtgattttcgtcgacaccgacaccgcggtgcagaagtatccggaaatcgtcaagaagtatttcggcaagtgcattccgagcaacgacaacaaattctcggcattgaacaccgccgcatggtcgggcggatcgttcgtctacgtgccgaagggcgtgcatgtcgatattccgttgcaggcatacttccgtatcaatacgccgaatatgggtcagttcgagcgcacgttgattattgccgatgagggatcgtacgtgcattatgtggaaggctgcaccgcaccgatctactcgaccgattcgttgcattccggtgtggtggagattttcgtcgagccgcatgcccgcgtgcgctacaccactgtgcagaactggtcgaacaacgtttacaatttggtgacgcagcgtgcctacgtgcgtgaaggcggcaccatggaatgggtcgatggcaacattggttccaaggcaaccatgaagtatccggcctgcattctcgccgagccgtatgcgaaggccagcaccatgtcgctcggcttcgcaggcaagggccagtatcaggacaccggcgcgaagatgatccatcttgccccgcataccagctccaccattgtggcgaagtcgatttcccgcggcggtggacgttccgcataccgtggtctcgtcaaaatcgtcaagggtgccgaaggatcgtccaactcgacggtatgcgatgcactgcttgtagatgagttcagccgctccgacacctacccgcatgtggacgtgcgcgaagatgacgtttccatggcacatgaggctacggtttccaaggtttccgaagaccagctgttctacctgatgagccgcggtctttctgaagacgaggccatgggcatgatcgtgcgaggcttcgtggagcctatcagccgtgagctgccgatggaatacgcgcttgaactgaaccgactggtggaattgcagatggaaggatcggtgggctgattaccatggcacaaactcaggaaatcaacattcccgttgcggatccgaacgatccgtatgcgaatccggcagccatgccctcttcggcggatcgctcgccgcggtcatttgatgtggacgcatttgaagtgcccgaccgcaagcaggatgattggcgttatacccctgtggaacgtgtcgaagagttcttcaacgcgttcacgccgtcgaacgaaacccagattgccgtcactatgatcgacggcacggctcttactgaaggcgtgacctatagcgagggcaagccgggagacgccgatacgggcatcgtttccaagccctgcgatcgtgtgtccgcagtggaatggaactccgcctcccgtgccggaattctgcgtatcgacggtgaaatcagccagccgatactcgttaagattcatggttccggaacggatctggacgcattccacctggtgatcattgccgccgatcgcgcccacgctgacgttgtggtagagcatgacggcgatgcacgtatcgccgaaggtgtggagattctcacaggtagggactcccatgtgtccaccacattcattcaagagtggaacaagggctccaagcatgtgggcaaccagcgtatccacttgggggagggtgcgtccctgcgccattccgtggtcacgcttggcggcgatgtcgttcgaatccgtatggatcaggattttggcggcgatcaaggcgatctcaacatgcttggcatctactttgtggatccgggcgagcatatcgaacatcgcaccatgattgtgcacaaccatcccgagtgcaagagtcgtgtggtatataaaggcgctcttgacggcaagggcgcgcactccacatgggtcggcaacgcgctgattgctccgaccgcgccgggtaccgactcgtatgagctcaaccgcaatttggtacttactccgggcgcgatcgccgattccgaaccgaatctggaaatcgaaaacggcaacatcatcggagccggacatgcctcttccgtcgggcgctttgacgatgaggagctgttctatctgcagtcccgcggcattccggaaaccgaagcccgcaaacttgtggtgcgaggcttttttggcgaactcgtcgaggaaatcggcattcccgcaatcagcgaacatctcatgaacgttatcgacaagcgcctggcacgtggcgagaacgacgcgatcgcccaggtgttggaagagaagtagaacgtaggagcgaaaaccatgtcaactcttgaaatcaaagatctgtacgcgcacgtcgaaaccaaggacggcatcaagccgatcctcaaaggcgtgaacctgaccgtcaactccggtgaaacccatgccatcatggggccgaacggatccggcaaatccacgctggcctacacgctggcgggccaccccaagtacgtggtcgattccggacaggtgctgctcgacggcgaagacatcctcaagatgaccccggacgagcgagccaaggcaggcatcttcctagccatgcagtatccggtcgaagtgccgggcgtgtcgatgaccaacttcctgcgcaccgcaaaaaccgaagtcgacggcaaggctccggccatccgcacgtggaccaaggaactgtccgaggcgatgaagcgcctgaagatggatccgaagttcgctacacgttccgtgaacgagggtttctccggcggcgagaagaagcgtgccgaagtgctgcagctcgaactgctcaagccgaagttcgccatcctcgacgaaaccgactccggccttgacgttgacgcgttgcgcattgtctccgaaggtgtgaaccgcgccaaggaagccaaccagttcggtattctcatggtcacgcactacacgcgaatcctcaagtacatcaagccggacatcgtgcatgtgttcgcagccggtcacttcgtcaagaccggcggccctgaactggccgatgagctcgaggaatccggctatgacgcatacctgccggaaggatccgattccgaaagcgcgctggcatgaccgattttgcagcgattcgcaaggaatttccgatccttgatcaggagatccacggccatccgctcgtgtatttggattccgcggcgacttctcagaagccgcaatgcgtgatcgacgccgaaagcgatttttaccgcaccatcaacgccggcgtgcatcgtggagcgcatgagcttgccgcacgcagcaccatggcgttcgaagaggcacgtgccaaagtcgcacgtcttgtcggcgccaactccgctgaaggcgaagaggagatcgttgtcacctccggcgccaccgcaggactgaatctgctagccaccgcattcggcaacgcatcgctgggacgtgggggagaagcggcacgacgtttcgctgtgaagccgggagacgaaatcgtcgtatccaaggccgaacaccactccgtgctattgccgttccaggagcttgccgtgcgtaccggagcgacattgaaatggttcgatctggacagtgaaggtcgcatcctttccaacactgcggacgaggtgatcaccgaacgcacaaagatcgtggccgtcacccatgtgggcaacaccaccggtgccatcaccgacatcgcgccgatggtgaaacgtgcgcacgaggtaggcgcggtggttgtgctcgacgcatgccagtccgtaccgcacctgaagatcgacctccacgctttggacgttgacttcgcggcatggagcgcgcataagatgtacggcccgaccggtgtcggcttcctctacggcaagcgcgacatgttggaggcgttgccaccggcgaatttcggtggatccatggtggaacttgcctggatggatcaggaagcccaatacatggctcctcctgcgcgtttcgaggcgggcacgcagccggtcgcgcaggtcgttgcggccggtgtcgcggccgaatggctgatgaatatcggcatggagaatctcgaagcccacgagcgcgttatcgcaggcgaactcctcaagatggggcagatcgacggcgtgcgcattctcggaccgcagaccaacgagcagcgcatcggcacggtggcttttgaaatcgacggcgtgcatccgcatgatgttggccagttcatcgatgcgcagggcatcgccattcgtgtcggacatcattgcgcgcagccggtccaccgtcacttcggcgtgtacgcatccaaccgcgcatccagtggcatctacaattccgtcgaagacgcgcaggcattggttgaggcgttgaagaaggtccgtccgttttttggagttgagtaacgcatatgagtgattttgcaatgtctggcgacgatctcgagcagatgtaccaagaggtcattctcgaagcctcgaagaatccgcatggcaaggagcatttcgctccggatctggcttccgaaaacgcctcccaggcgggaaagaccacgcttcaggcaacccacgagtattgcactcccggcgagtcccaccagttcaatccgacctgcggagacgaggccaccgtgcatgtggaggtttccgaccaggagccgcacgttatcgaacgactggtgtgggacggtcacggctgctccatttcacaggccagcctttcggtgatggtggatctggtggaaggcaaaaccgtggatgaggccatggaattggccggaacgttccataagctcatggaatcacgcggcaaaggcttggacgatgaatccgccgaggaatcgttggaagacggcatcgtgttccaaggagtgtccaagtatccaatgcgtatcaagtgcgcgctgctcggatgggaaggcatgaaggactccgtggccaaggcattggccgcgaaagcctgacaagtattgttctatggtggaaagcaggatgtctcccgtgcttcgtgcgccgcgttctacaacgggcgaaacacgtgagacaaactccagccaacgcgataggctactcaacggaacatattcgaatcatatatggagcgacaatgagcgataccttggtacctgaaccgcaagcctcgattttcgattccgtggccaaggcattgggcaatgacgaggccgctgcgcgtcgcgtcatgcttaacccaaatctcgccaaaggattcaaggacggcaaaccagtggaaatcgaacacgaagacaccgagcaggacgcttgtggctgcggcaatcgggctggagcatgcggttgttccgaagaacaggatgacggcatcgcgttgaaggctattgacgacattggccgagctactgcggccgacgtgaaggaagcgttgcatcaggtcattgatcctgaactcggcattgatgtgattgatttgggattggtgtatggcattgagatcgatgagcttggtcgcgccattatcacgatgacattgaccactccggcatgcccgttgactgatctgatcgaagacgagtgcgcgagcacgcttgccggcctcgtcgaggaattccgtatcgactggacgtggcagccgcgttggagcatggaaaagatcacgccggaaggtcgcgagcagttggctgcgcttggcttcaatttcgacaatctgccaaaatactgacagaaagtcagtgatatatcaatctgatattgctgatatgttgattccgcagcgaaactgcatgttcgttgcggaatttttgtttttgtaaaacagattttgatgatatttgattggatatcatcatcaagaaaaatggcacagaaaaagcgtgctcccgacgccgggaagcacgcttttgttctgtgtgcggcagaacgtcagtcgtcgaccacggtacccttcggcaccacggtgatgccttccggcgtgacggtgaagccacgggccagatcatgttcggtatcgataccgacggtcgaattctcggtaagcacaacattcttgtcgaggatcgccttgtagacgcgtgctcgacgattgatggtcacgccgtcgaacagaatcgaatcgacgacctgggaccacgagtggatacgcacgttcggcgaaagcacggaatgatgcacttcaccgcccgatacgatgacgccaggggagacgatcgagtcggtggcgtgtccgagacggtcgcgaccggcatggacgaacttcgctggcggcagattgccggacagcgtgtaaatcggccattcggtgttgtacaggttgaattccggcacatacgagatcagatccatatgcgcatcgtagaactgcttcagagtacccacgtcgcgccagtaggcatgatcggtcggcgtcgctcccggaatctcgttggagttgaagtcgtacacgccagcctcgttacgggccgcgaagtacggtgcgatatcgccgcccatatcatgcttggtgtcttcggccttctcgtcaagcgccaaagcttcgaacagggcgtcggtgttggccacgtagttgcccatggaagcaagaatggagttcggatcatctggcaggccggtcgtggtctgcggcttctcctggaagctcttgatcatattcgggtgctccggatcaacctcgatcacgccgaactggttggactggctgatcggctggcgaatacccgccaccgtgaactccgcgccggattcgatatgctgctgcaccatctgctggaaatccatgcggtagacgtggtcggcgccgacgatcaccacaatatccggctgcacgtcctcgatgatgttgatggtctggtagatggcgtcggcagagccgagataccagtgcttgccaagtcgctgctgagccggaacaggggaaacgtagttgccgagcaacggcgaaaaacgccacaccgtggaaatatgacggtcaagcgaatgggacttgtactgggtgagcaccacggtctgcatatagcctgaattgaccaaattgctcagcgggaaatcaatcagacggaacacgccgccgaacgggacggcgggctttgcccggtctctggtcaaaggcatcagacgagtgccttcgcctcctgcaagcacgatggaaagaattttcggattctttgccatgagaactcctctcctagagcgtcgttacgacaccgcacacattggtcggtctgcatcatcgcaaaccacttacgcactcaataattgcatattttttgcaacatgcaaggagtttgcatcgcgagtcttgaaaatttgctgactgtttcaatgaacagccgttgaatagaaggccacggcgctcgatgcggcgacgttaagactgtccactccgtggctcatgggaatcttgaccgtcaggtcggcgcgggagatggtgtgatgcgacagaccgtcgccttcggtgccgaaaatcagcgccaatttgtcgatatggtccttttcgccgttgtcgttgttcaaacgacgaacaagctcctccagcgaaatggaatcgtcttcaagggccatcgcaacggtggtgaacccaagatcgcgcaattcctgcatgccggtgaatggccagtagtgtttatcatctccgccaatacgagtccacggaatctgaaacaccgtgcccatcgacacgcgggcggcgcgccgatacaatggatcgccgcaggagggcgtcaccaacactgcatcgacgttcaacgcggcggctgatcgcatgagggctccgacattggtgtggtcaacgatgttttccatgaccgcgatgcgtcgtgcgccgcgacacacctcctcgacgctgggcagtggccagcgtttcatcgcggccagggcgccacgatgcaagcggtagccggtcagctgcttgagctgttcaggggatgccacgtacacgggaatgtcggtgccccaacgttggtcgatgcgtgcgaaggtttccgacatgcctccgatccacggttcttcgacaagcagggaaattggttcccggtcggcggtcagcgcgcgatcgatgactttcggcgattccgcgatgaacaggcccttgctgggttcaagcttgttgcgaagctggatttccgtgagattcgtgtatgccgacacgcgctcgtcgtcaatggaatcaagatggatgaactgcatgtgatcgatctttcgccgaatagctttcagatacaagaaaaccccttgtttccaaggggtttgctggtgtccggagcgggacttgaacccgcacgcctgtataaataggcactagcacctcaagctagcgcgtctaccattccgccacccggacaggtgcgttgctcagtggcaacaaacgaaaactatagcagatgctcggtgtgatgcaagtctcggcgtgtcgcgcggaattacgccattggtatccgaggtgctggtaggctctgaaactatgactgatgcccttttcctgcttgatacggaacatgatgatgtgccggtgaacagtgacgaattgaacgccggatggaaattgacgttgccccagtcggtgcgtcgacatgccattcaggccatgcgtctgaaagacggtgacgaattgcagctttccgacggtaaagggctacgtatccacgcggtgttgcgcgatgcgcaacaaggaatcgcggaagtgtcgagcttcggcaaagaaccgcagcctaccaccaaactcgctttgatccaagcgctggcgaaaacaggacacgatgagcaggccatcgacaccgcaacgcagatcggtgtggatgaggtgattccatggcaggctgatcgttccatcgccaaatggaaggcggggcgcaccgataagaagtggcggcaagtgcttgatgccgccactgaacaatcccgacgctcctggacgccggaattgggggagtgcgtgaccagcaagcagttgattgccatttgcaagcgtgcctgtgtgcacggcgacatggtgattgtgctgcaccaggatgctaccaaaacttggggccagctggaggaagcgatcgcggtgctttccgacaaatgcttgcaggacgggcgccagcgcaccgtgtacgtggtggtcggcccggaaggcggcatcagcgatgctgaaatcgaatccttcaccaatgcgggagctgaagcatgcgtgcttggaagcaatattctgcgagcgtcgacagctggtcccgtcgcgttatcgctgctcgcacgggcgttgggacgattcatctgacgccacacgccggcgaaatgcggcggattatcccggttgcgcaatagcatgggtaccgaaggacaaccagcattaaggagcattatgagcgacaaggattgcctgttctgcaagatcatcgcaggagaaattccaagcgaaaaagtgtatgaggacgataccacctacgcattcaaggacatcaatccgaaagccaaagtacatgtgctcgtggtgcctcgcaagcattatgcgaacgtggccgagcttgcggcggccgatccccagcagctcgcccacatggctcaggtcgcgcaaaatatcgccgaccaggaattccacggtgccttccgcctgatcttcaacaccggaattgatgctggccagacggtattccacgtgcatgctcacgtgctgaccggcgaaaagcttgacgaataatcttccctttccccatatatcgacgtcagaagaggttttgtggccactactacacgtaccatcgcgattccgcagcagcttgacccggtgaccgtgctcggaccggtcgacgaggtccttcgggaagtggaacgtgtgttccccgacttgaccattatcgtcagaggcaaccgcatcgcgatcatgtcacgttccagcaaatccgaatcccaagccgcacaggccgagcatgtgatcgaaaacatcatccaagccgcatatacggctccgatggacgccgatacggtgcgacgcatgctcgatcaaaacgtgttgaaaaatcctgtgcgtgctactcgcccgggccatggacgtgtagtggaggaactacggctggccgatcggcaacaggagcatacctccaatcgcgagaatcatgcggaccgacgcaaaccgcatgtgcccggagtgatcacctttgcgctcggcaagccggtgcgtgccaaaacggctggtcagatcacatatgtcaatgccatcgaatcacataccatcacatttgccatcggaccggcaggcaccggcaaaacataccttgcagtggcgaaagcggtacgcgcattccaagataggcaggtgcgccgcattatcctgaccagaccagccgtcgaggcgggagaaagccttggttttcttcccggcacattgaacgaaaaagtcgatccatatctgcgtccgctatatgatgcgctttctgacatgctcggggcagaccagctcaagcgctacatggacgacggcaccatcgaagtcgcaccgctcgcatatatgcgtggacgcacgctcaacgatgcattcgtgatcctcgatgaagcgcagaacaccaccgaacaacaaatgaagatgttcctgacccgactaggcttcaatacgaaaatgattatcaccggcgacgtgacgcaggtcgatctgacagtaccgaaatccgggctcgccaccatcgaacgcatccttgacggcattgacgacatcgcattcgcccacctcaaaccggaagacgtagtgcgacacgcgcttgtcggcaaaatcgtcgcagcgtacgaccgacacgcggccattgccggcgaccacagcagacacgccacgggcaaaaccacatccaggcaaacaagcgagcaaatcgaaaggaacgccgaatgagcgtcgaggtaaccaacgaaaccgtctggcaaattgacggcaaggtgttctccgatcttggcatatgggtgatggaccaaatgcgggtcagcacgcaatccgacctgaccatcatgttcgtagaccccgatcccatcgcccaactgcacatgcgttggatgaatcttgaaggccccaccgacgtgatgagcttccccatggacgagctgcgcccaggagacggccgaactgtgatggaaggcgtgcttggagatatcgtgatttgcccgtgggtggctgcgcagcaggcgctcgcggccggacataacaccatggaggaaatgatgctgctgacgattcatggcatcctccacctactcggatacgaccatgccaccccagaacaggagcgtcagatgttcggtctgcagcgacagctgctactcaccttcttcgcgcttcgccagggagcggggacgcaggccatccttccgccggatacgccggacgcgctcgccgaatgggataggcagcatggcacgggacggcagatcgccaaataatgattgacgttgccggtagcatatcgtccggcatgatgggggctgaattatgcaggcaacaatgattgcgatgatcgtggtgctcgccgtggtggcgctgctgttggtctggctgtcgctttcaatggctgcgactgaaggcgctgtgggacgtgtgaccagggcgagcctgaataaccttattctcgaaattcaaacggatgccgagctttcgcaattcatacgcgacaagaaaatcaggcgcattcataaggttcagcggttggtggccgatcgctatgccaccgccggatcgtgcgcgttcttccgcatctgctgcaatgtggttgatggtgtgctcgtgacggtgattgcgggcatgttggacgctccactatgggccgaattgcttgccggatttgtttttgccatcgtcattgcggtgatttcgctgttggtgcgtccgcgtagtgccggggcatccaagccagtcgacattatgctgcagcatgtggatgctgtttccattgcggttctattaaccccattcgcaaaaatcggggggcaaaaaggcgcgaagcgtcgcggcagtgatctttccgacgacgaggagctcgaaaaaatccagatcgaacaaggacgggcaaccattgaccgtctggtcgaagccaacgatttcgatcctgaagtttccgaaatgctgcgcaatgtgctcacgctttccgaaacactgactcgtgagatcatggtgccgcgcaccgacatgatttgcatcgagcgagacgaaacgttggagaatatgcttaagctttgctcccgttccggattctcacgtgtgccggtcatcggcgacgatgtggacgatctggtcggcgtggcttatttgaaagatgccgtgcgcgcgacggccttcaaccatgcggcgatgacacgcgaagtcgaatcgatagttcgtgaccccatgctcgtgccggaatccaagccggtcgacgatcttttccaccaaatgcagcgcacacgccagcatgtcgccattgtggtggatgaatatggcggaatcgcgggcatggtcaccatcgaagatgccatcgagcagattgtgggcgaactggaagacgaacatgatcgcacgcaacatgccgatccggaacggatcggtgacaagaaatggagcatgcccgcacgcacgcctatcgccgacttggaagagattttcgaaatcgacattgacgaggatgatgtcgacaccgtttacggcttgctgaccaagctgttgggacgtgtgccgatcgtcggatcctccgcagtcactcgaggcttgcgcatgaccgcggtcgactccgcaggacgccgcaaaaaagtgtcgaccattgtggtggagccggcccacgtcgagggcgtggacgaaactgaaacacgtaacgaagaacatgcggatgatgccgaaaaggcatccgacaacgataaggattccaaagacaagcatgactgacgcagcaacaaccgagacgacttccgaccattccgattccgccaggcccgttccatatcggtccggtttcgttgccgtggtcgggcgtcctaacgtgggcaagtcgacgttgatcaacgcgttgatcggtacgcagatcgccatcgcatcatctcgcccggaaaccactcgtaaagccattcgtggcattttaaccacggataatgcgcagatcgttttggttgatacgcctggcatccatcgaccgcgcacactacttgggcagcgtctgaacgatgttgtggacgagtcgctcgccgacgtggacgccgttgctttcctgctgcctggtaatcaggagattggtcccggcgacaagcgcattttgagccgtctgcgttctgatttcgcagtcaagcgagatgatggcacattcaaatggaaggtgccgctggttgccatcgttaccaagattgacgaattaagccgtgacgggctgatcaacaagctcattgaaatcaacgaattcgccgacttcaccgatattgtgccagtcagcgcgctgaagcatgacaatcttgcggaagtcaagaacgtgcttatcgagaacatgccggaaggcccgcaaatgtacccggccgagcagatcaccgaagagcgtccggaagaaaccattgcggaactggtccgtggcgctttcctggaagaattggatgacgagttgccgcattcactggccgtagtcgtggattccatcgaatatccggaagacaacgatagtggcgaagcttacgatggcaaagcccacgtgattgtgtcgatttatgtggaacgcgattcccagaaaccgatcatcatcggcaagggagcggaacatcttgtgcgtgtcaagaagaagttgcgtacgccggtcaaccgtattgttggacagaaagccaaactcgatttgcatgtcaaggttgccaagggatggcagtcggatcctaaacagctcgagaagctaggcttctgatctgtttaggatccgcttcgcagcgaagctgctcacttcacctaaggacagtccactggactgtccttttgacggttcagccaaacagctcgagaagctaggcttctgatctgcttaggatccgcttcgcaacgattgcgtggaaaataataaatgaggtctgattcccgtaggagtcagacctcattctgctgtttcgaagactacttcttcttggtgtacatctgcgtattcagcaaagtggcataacgcttgatgaccttcggacgaatcaccttcatggaagcggtcatcaaaccattctcctgagtgaattcctccggcagaatgatgaacttacgtacggactccgcacgggaaacaccttcgttggcctgatcgacccacttctgcacttccgcacggacggcggcattgttggcggcctcctccatgggtatgtcgcgattcagccccttgctttccaaccacggacgcaaggattcctcgtcaagcgtaacaagtgcggaaatgaatggacgcttgtcgccaagcaccaaggcctgggaaacgaattcgcaacgcttgataacctcttcgatcggaccgggcgagacatttttgccgcctgcggtgatgatgagatccttcttacgtccgatgatatacaggaagccgtcatcgtcgatacgtcccaaatcgccggtacgataccagccgtcttcagtgaatgaatcctcggaggcttcctcgttcttgtggtacttcgggaacacggcggtacccttgacctgaatctcctcatcttcggcgatacgcagctcgaagccagggaaagccacgccgacggaaccctgatgatagggcacaccaagcggattgaacgcgcaaggagccgtggtctcggtcaagccataaccctcatacacgggcactccggcgccacggaagaacgccataagttccgggtcaagaggagcgccgcccgccacgatccactgggcacgtccgccgagcacctcgcgtagcgaagcgtagaccaccgggtcgaacgccatacggcgagccttggccaaagctccggccttacccttcgcactgacctccttcatgtaattctgggctgccacaacggctgcggcgaacgccacgcccttagcgccatgaccagccttctgcgaggccgcgttatacaccttctcaagaacacgcggaacaacgatcatgacggacggcttggcgacctgaagatcggcgatcagcgtcttgatgccctgcgcgatgtaaatatgcagttcgctggccacgcaaatgtagttgatggcacgtgcgaaagagtgcgcctgtggaaggaacagcagcacgctgttcttcctctcatgcagcagtttcggcatatacgccggaagattcaacgcggtggtgcaataatgctcatgggtcatctccacacccttcggcgcggcggtggaaccagaagtatacacaatggagcacaggtcggttttcttgatggaagcgatgcgctcgtcaagctcttcgtcgctcacgccggagccgtaggccatgatttcgtcgagaccgccgttctcgaagcagataatgtgttccagtgccgggcattccttatcggcaccatcggctttggcgcgcatatcggtggtctcgaccaccagcaagcgggaatcggaattattgacgatattacggatctgctccgcggaatccgtgtcgtagatcgtggcgagcacaccaccacatgccatgacggccgcgtcgaacacatcccactcgtacgaggtacggcacatgaacgccacgccgtcgcccttcttaagaccgtaatgcatcagacccttggcgatctgacgaatatcggcgagcacctcgttgccggttttggtcacccattcgccgttcgtcttataggtgtagagcggctcgtcacccatacgctcggctcgatcggcgtaaatatcgtagatggtggtgccctcgtccagcggcggcttgccctcggttttggtggtcaacagaccggtttccggatcgaggaacgtggtggatgggaatccttcgccccattcgacggtgtgcggaaggtcgatatggccgtcgggggagatgatgttgttcggatcgttgtaatccggagtgttgccggaatcgtcgctgacggggtgaacgaagtcacctcccaaacgcagtgccttctgcgcaagatttgcagctcgcttgttcaaagaggtgatgacggacacgtgactctcctacacatttaaatccaatatctgtaggaatgatagacccatgaatgcgacacgtcaccttacggtagcgtagggaaagtgcgcatccagcggggcctgcgtaaaggaattgccatgcgatgccattcaataggtgaacttttcttcatacaaaggtgtgacctacgttacactggtgcgctgtatctgttcattttgatttctttaacgaggaagaaagggcacctatggctgaaacagctgaagccaccgtggtcttcggagttctcaatgagacctccgaacacgagtctcgtgttgctctgacaccggatatcgtaacgaggttgcgtaaatcgggtgttaactgcctgatcgaatccggtgcgggcgtcgtatcgcattatgttgatgaggattatagtaaggccggagcgcaggtcgtctccgccgatgaagtgattgcgcgtgccgacgtgcttggtttcgtcgatcgtccgagcagcgcgctgctcggacgcgttaagcagggtacctggattatcggtatgctcggttcgttcaccgacgccgattatgtcactgcgattgaaaaggccggtctggtcggtgttgccatggagaagctgccgcgtcagttgagctccgcgcagtctatggacgagatgacttctcagaattccgtaatgggttataaggcggccatcgtggcggccaacgcgtacggttcgttcctgccgatgatgaccaccgccgctggcacgatccgcccggccaaggtgcttattcttggcgcaggcatcgcgggtctgcaggccatcggcaccgccaagcgtcttggcgcggttgtcaccgcgtacgatgtgcgtccggcttccaagggcgaagttgaatccttgggcgcgaagttcctggatctgggtcttgacttctccaagggtcagggcgagggcggctatgcccgtgcgctgagtgccgaagagcaggcccagcagcaggctgccgtcgatcagaaggctgccggcttcgatatcgtcatcaccaccgccaaggttcccggccgcaagcctccggttctgctgaccaaggctggcgtggccggactgcaccgtggcgctgtgatcgtcgactgcgcggcaagcgacctcggcggcaacgtcgaaggttccaccgtcggcacccaagtcactgaaaatggcgtgaccatcatcggcgctccgtacctgtcaagcggcgtttccactaccgcatccaacctgctgagccgcaatgtggccgatgtgcttgcgcatttcgtgcgtgacggcaagctggccatcgatctgaacgaagagcttgacaacgccatggtcgtggccggccgcggcgaggaagccaagaaggaaggggagtaagcaatggatatcgttgttgcgattactctgttcgtcctcgcgctgctgatcggcgttgaggttatcggcaaggtgccggccaccttgcatactccgttgatgtcgggcgcgaactcgatccacggcatcgtcatcgccggcgttgttatcgtcgccgcgcatgccaccagcccgctcgcctgggtgttcatcttcctggctgcagtgctgggcacgatgaacgtggtcggcggctatgtcgtcaccgaccgcatgctggagatgttcaagtccgacaagggcaagaagaaggaagaggaggccaagtaaatgggtaccatggctgaaatgctgagcacgccgctcggcgtcatcgaatggttcgtctatctgctggccgccgtgatgttcgttatcggcctgcacttgatgaactctccgaagaccgctcgcaagggcaatatggtctccgctgtcggcatgatccttgccgtggtcatggcgttcattgtgctgttcgcaggtgagatctccaacggattccagcatggcgttgccgttgtgctgctgatagccggcatcatcatcggtgccgtcgccggtgtggtttccgccaagaaggtcaagatgaccgacatgccgcagctcgtttccgtattcaacaccgtgggtggcggcgccgccgcgcttgtggctttgaacgacattctgacctccgagggcacgccttccatcgtggtgttgatcaccgctggtttgggcatcatgatcggttccgtcacgttctccggctctctgatcgcagccggcaagctgcagggcatcaagtgggtgaagaagctgaacttgccgggcaagggcttctggaacattctgttcgccgtactgaccgtcgtatccttcgtcatgctgtgcgtgcagccgggccagcgtctgctgtggtccgtgctcaccaccgtgttcgcgctgtgctacggtctcgtgttcgtcatcccgatcggtggcgccgatatgccggtggtcatttccgtactcaacgcctgcaccggtactgcagtggccatgtccggcttggctatcaataacatcgctctgatcgtggccggcgcactggttggtgccgccggtgtgaccctgtccatcgccatgtccaaggccatgaaccgtccgctgctgtccgtgcttgcaggcggtttcggtggtgccaatgccgccgctggcgctggtgagggtccggaaggcagcatgaaggaaacttccgcggacgatctggccgtacagctcgtatacgccgaaaaggtcatcttcgtgccgggcttcggtctggcccaggctcaggcccagcgcgagcttgctgatcttggtgtgctcctcaagaaccacggcgtcgaagtctcctacgccatccatccggtggcaggccgtatgcctggccacatgaacgtgctgctcgccgaagccaacgtgccgtacgaggagctcgtcgatctggatgacatcaatccgcagttcccgcaggccaacgtggctcttgtggtcggcgccaacgatgtgaccaacccggccgcacgcaagccgggcaccccggtctccggcatgccgatcctcgacgtcgacaaggcccagaacgtggtggtcatgaagcgcggtcgcggtaccggttatgccggtatccagaacgaactgtacttcgaagacaacacgcagatgcttttcggcgacgccaaggcaagcctgcaggccgttatcgcggcagtcaaggagctcatcaactaacagctgaaacgttgcgttgatgcttttcctgaaaggtctcttccggtgagggaagggacctttttgcatatggtgattttcgtaagatcaggtctgttgcatgcgaattgtgagttatccacagtcgttattcgcctgtggatatgggtggagttttccacatatccacagattttcaaggttcggtggcgcaagatgatttgaatatgagacagtaggtgcaccctacaacaaaggagttgcacatggcggaaataatcactggcccgttccatatggatgaacagggatttttggcaacgatcgaagaacttatcgagcggtttgatggatacagttctggcaaatatcttgcggaattgggaaaaatccacgatgaatacggtgagatcggatctctttcgctttttgacgaaaaagtctgtgaactggggaaggaattattctgcagcacatcatgggtggcgaatctggcgtgggccatgatttcgttcgattatgatctggttgagcatgatgcgaattttcttgatggatgccgtaacatcgtgcgtaagtacggtatgagcgtttggctctatgaaatgatcaatgacgcttcgatagcggtggctttgcaaaggcccagcagcagaatgccattccagattggattgacctacaccaaggatgtgtttcggagaagcaagaaaaagggtggaaaatacgctaccagcaaaaagaagagactggcctgcatggctgaatatttgcaggaagtatattggctggccgcgtacagtctgctacgttggggtgaggaagagccgcgtgcggccgatgttgcgttgatggtgcttggatatggcggtatcggcatgtgcatgctgagggacgatccgaaagtggtggattccggatgcgatgaagacttctcctatcgaaatctgtgcgaccatctgcgcgatcttagaattcaagccgatctggactatgcttgcaatgccgaccttgccgaatccatgttgcttgaatatcccgcgtgtatggatgcgcgatatctgtacgatgcggggaaaatcgtggaagcgtatcgtgctttgtggaacaagcagactgaatcagcttcgcaaatcatggaacgcgtttaccagaagggcgcgtatcaggtgacgaacatttgggaggatccgctgtacctgcatgatcttgccctgtcgctgttgggggcagttggctcgcggccccttactgaagggttccggactcgtgatggcaagatgttccagcagggagtggaaagtctgagacgaacgactgaatccgttaaagggatggggttggcgatgacattgggagggtatatctacttcccggaaccggaaagtagggatgatgcgcttttcgcaccgcgaaaggagaagaaacgattaatggacgcctgtaacgggcttagggatttgtcggcaatggttgcgctctaccgttttccaagggatatcgaatccctgcgtgcaacgcgtgcgcttctcgctcatgacgcgaagggatatatcgatctgatgggtccatacatgggaagcgcggatgagacgggaggaaacgaggggaggccggtttcaatcggcgactgatcggcctctcagatcgcgaacgtcaaagcgtatgtatcatggttgtgccgagattgaatggcggaacgttcagatgaactttgtctcttcgatctcggtgcatgctatgccgtattgctccaacaattcgcgaaatgcttttacgtatctatctgtggcgaacttctgtgtgaatgacagacagaagttctcgtttacgtaattcacttccaccagcgtggacgtccaatccgcataggcgtaacaattttggacatgccgtgccaaagaaccccgatcgaacattcctgtataactgatgtcagccgttgaacatcgcatgctgataacttgtctgcacatctgtttctgggcttccagattcggcaggctctcaagatagtgattcagccaagtggttcctgccagcttgggaatcagtgtttcaatatcgcacgcgtctacctgttcatggggcattttcagcttggtccggcagatgcggcccttggcacaatctttgcacagaccatcagtgtgatcgtcgcgctggtggtgattcgttgcaagcagaaaggcattcgtttaaggaaggctgatttcaagccgaatcgcaatatgttgggcggcattctcagcatacggacgttcgtatatcggcttcattaccctgccttacttggaaatcgtatcgtcaaggtgcgcaaacagtgggcgagccaaccatgccaagggtagtgatgccagtgctgaaatcagcagtataagccaaaccgtgcaatgtgcgtgcagccatccgtaaagcatttgcccgagtggctgggcgcatatcgtcaatgatgaaataatggccatgaccttgcctgtaagcgcggttggtgtcctcatctgaatagatggtacgagaatgaggttcaagaaatcaacggcgattatgactgccgcagtgcagagcaccagcatgatgagcttggtttgcgttgaacatggaagcaggaaggcgatggccggtgggagcagcataagactttccacgaacaacaacgaaggggcgtttcgtgatttcaaacggttggcgaaacagccagcgatgaatgttcccgctatgccggcaatgccgataatgccatcgcatagaccatatgtcgccgcatcgtagcctaacgtagttcgaataatgtaaggaaagcttactgaactgaatccagtcagtatcagattgatccatgtgcaaacaccggctaatcgtgctacggtcggctccttgcgaagcaggaaagcggtcgccgaatgcatatcgccaatgatgacgtcgagcaggcagatgccggcatcatcttgattcgataggggctttgcgagtctgatgaagcattcaaccatggctgccgacataagacatgctgcggtgatgagcatcatcggtcgaatgccgaccagcccgtacatcacgccacctaggaaactcgggagtaattggctgagctgctgcacttggttgatgatggccgcgcctcggcgaagatcagtggaggactctcttccgatgatttgtggcagtgcggattgcacgacgggagtttccatggcatcgagtactgccaacactacctgcatgatggcgatggcgagaatgttgaatccggatagtgcgaaaaacacagtcgcgagcagtgtgacgattcctgagatgatatcgagcgccaccatcatggcacgtttgcttactcggtcggccataacacctccgaatgggctaataagtatggtcggaatgacggatatggccagcacggtggcgaaggtcgtggatgatgcggtttcgtccagtacccacatggacatggcaaatcggagcatggtattgccgaacaaggaaatgccttgaccgagtacaagcaggatgaagtttgcggagcacaagctggattggagtgtctttgctgacgagtttttcatgactattcctttctataccgactgacggtatgtaaaaaaggtacaaataaagatagattgacattgccgagcttttattgcggattactggcgagtaggaagaagccttccgcaagccgatcttccatatcactgtcgtgatcgataagtggaactccgagcgagtccataatcaatccaagacagtggatgcgatgcttgaattcacttagggtagtgatggggtagaagtttggggctagccagtaattgaacagcagtgaaaaaagttccgcggcttcttgagggtattcggttgtgattgaaccgtcccttaacccctcctggatgaagtcgtatgcgattttggtgctgtcggttcgccagatgcgaagattttcggcgaggattttcgggtcgttcagcaggggaaacgcatcgcgcatgagggtcatatgttcggtgtcggtaatctgcatcatgagcgaattgcgtagtttctgcaatccgtttcgcgagccatcctcttgatttgcctggggaagaagtcgttcgttgtcggaatctatcagcgcatgcagcatcgcttctttgtttttgaaatgatggtagatagcgcctttgctgaggtcttcgagctcgtcgagaatatcttgaatcgtggtgcgctcataccccttttgcgcgaacagctttttcgcggcgtcaaggattcgctgtcgcgtcacttcagggtgcgcattgcgcgccatatgcctctccttcgatgatggagtcgaatacaccgacattatacataccgttggtcggtgtggtatgtcggacacttcccagctcggtcgaagaggtaccgaaagaatctctgcagatttctgcgaagaaacctgaatctgcgttgccggggtgcgggatgtctgtcttttctgcggttggtgcatgattgggtgtccaaggtcaacttgagtgagtgacggctgggttcccgaagggaataagaccctggttcctatatgcctttttatggcatggggctttcggtgaagaacgattgcatccgatgtgaaaaatcccacaaatccggcccacgtcctgctctagaacttcaaaactgttgccaatactggaaacacgccgtatatagtgtttgaaaatgtgacgagacactgtatgttgtggtcttgatttttattttcgttcggataatgtgtgccacataccaacgacgtacggtcgtgaaaggacgtggaacatgaacattacgttatacaccaaagcaaactgcccgcaatgcacggcgacgaaacgccaattggacaaacgaggccttccctatacgactgtcgacattacggccaacgcacgtatttccgacagattgcggaacgaaggatggcggcagatgccagtcatcatcgcagacgacgaatcctggtccgggtatcgtcccgacaaaatccacgagctggaggctcgctgccggtgagtgcgttggtgtacttctcgtcggcatcgggcaatacgacacgcttcgtcgaaggatgccgattggatgaattcggcattcatgcaatgcgcatcccgctgcggccggacgagccggagctgcatgtggatgagccctacgtcttgctgacacccacatacggcggaggaacaatcggcaaagcagtgcccgtgcaagtcaaacgattcctcaatgatgaacgcaaccgcagtggcatcatcggcgtcatcgcatcgggtaacaccaacttcggcgaagcctacggcatcgcaggcgacatcatcgcggctaaatgccgcgtgccgctactctaccggttcgaactgatgggcacttcagaagacaccgcgaccgtgcgcgaaggactgcgcagatttttcgacgaatacacacaacaggaacaacgataaccatgccagaagattcaatgacaccacacgcagcaaccgacgtcatagcctcctacgatcgcgcccatgactggcactcgctcaacgcgatgctgaatctctacgacaagcaggggcacatccaatttgataaagacatccaagccgtacgcgagtacgtcgaaaagcacgtgctgccgaacaccgtccacttcaactccacacaagacagactcagccggctcatcgcagacggctattacgacgaatccgtatttgcccaatatgatgccgaattccttgacaggttctaccgcaacgtggatgactgcggattcgaattcgatacattcctcggagctttcaagttccaccgctcatacgcattgaaaacctttgacggcaaacagtacctggagaacttcccgcaacgcgcggccgccgttgcgctcgcgcttgccgccggcgaccatgcggccgccgaatcgtatttcgaagaacttatatcaggacgtttccaaccggcgacgcccactttcctcaacctcggcaaagcgcagcgcggagaggcggtcagctgttttctcgtacgtatcgaagacaacatggagtccatatcgcgtggcatcaacgccgcattgcagctgagcaaacgaggtggaggcgtcgcgctgttgcttagcaatctgcgcgaggccggcgcgcccatcaagcgcatcaaacaccagtccagcggcgttgtgcctgtgatgaaactgcttgaggactctttcagctacgccaaccagttgggcgctagacagggtgccggtgcggtgtacctcaacgctcatcatccggacatcatgcatttcctcgataccaaacgcgagaacgcggatgagaagatccgtatcaaatctttggctcttggagtagtgatacccgacatcacattcgagctggcgaagagacacgaacctatggccctgttcagcccatatgacgtcgaacgcgtcatgggtagacccttcgccgatgtctccatcagcgaaaactaccggaatatggtggacgatgaacgcatcgggaaaacctacatcgacgcacgagagttcttcatgactttggccgaattgcaattcgaatccggatacccgtacatggtgttcgaagatactgtgaaccgagccaacccgatcgacggacgaatcgccatgagcaacctgtgctcggagatcctccaagtgcaggagccaagtacctatcatgaggatctgtcctacaatcacgtgggacgtgacgtgtcctgcaatcttggatcgctcaacatcgccaaagcgatggacggtgatttgggacgaaccgtggaacgtgcgattcgcgcattgacctcggtgtcggaacatacggacatcgcgtgtgtgccatccatccgacgcgccaacgacgaaggtcatgccatcggcttgggacagatgaacctccatggattccttgccagagaatcgatcatgtacggttcgccggaagccctcgacttcaccgacatgtacttcatgaccgttgcgtaccatgcctaccgtgcctcgcatgagctcgcagtcgaacgcggaacacggtttgcaggcttcgaacggtccgcctatgctaagcctgcaggcgcaggcaactatttcgacaaatatacgaacggcgagcgctcgctggcgccgaagaccgggaaaatcgcgtcgctgttcgcacggcggggcatccatatccccaacgagcatgattggcgtcgtctgcgtgacgacatcatacgtgacggtatcttcaaccaatatctacaggccgtgccgcccaccgggtcaatttcgtacatcaatcattccacgagctccatccatcctatcgcctcgaagattgagattcgcaaggaaggcaagattggacggatctactatccagctccgtatatgaccaacgacaatctccagtatttcgcggatgcgtacgaaatcggatggaaggccattgttgatacgtatgccgaggcaacgcggcatgtcgatcaaggcctgtcgttgaccttgttcttccccgatacggcgactacccgagatttgaacaaggcgcagatttatgcatggcgcaaaggcatcaaaacgctgtattacatccgcattcgtcagcaggcgttgtctggcaccgaagtacaaggctgcgtcagttgcatgttgtgaaacctgtgacttgaaaggaaaagaaaagacatgtctcgtttggtttaccgcgcgatgcttcgtctgacggctccggacgaatacaggcggttatacggccgcgacgataagacgacgattagaaaggacgaccatcatggcgccgatatccgtacctcgacagaggattaagctcattgaccgtgtgagtgccatcaactggaacaaacttgaggatgacaaggaccttgaggtatgggacaggttgaccggcaatttttggctgccggagaaagtgcccgtctccaatgatttgcccgtttggcgcacaatgagcgaggccgagcatacgttgaccatgcgcgtgttcaccggtctcaccttgcttgacaccatccagggaaccgttggcgcggtcagcctcatacccgatgcgcttaccccgcatgaggaagccgtctatacgaacatcgcgttcatggagtcagtgcacgccaagagctattcctcgattttctccaccttgtgttccacccgacagatcgacgaggcgttctcttggagtgaggagaacgagtatctgcaaaggaaagcgcgcatcgtgctcgactattacgagggggatagtccactcaagcgcaaagtggcctccacgctgctggaatcgttcctgttctactcaggcttctatctaccgatgtatttctccgcgcatgccaaacttaccaacaccgccgacgtgatccgtcttattatccgcgacgaagccgtgcatggttattacatcggatacaaatatcaaaaagggcttgagcgggtcagcgaggacaaacgcggcgaactgcgcgactacacctacgacctgctcaacgagttgtatgacaacgaggtggagtacacgcgcagcctctacgagcctgtcggattgacgcaagatgtcgaaaagttcctgcgatacaacggcaacaaggcgttgatgaatctcggatatccagcgcttttcccacaagagatctgcgacgtgaacccgtcgatccttgccgcgttaagtccgaacgccgatgagaaccatgacttcttctccggttcgggaagctcgtacgtaatgggcaaatcagtcgagaccgacgacgatgactgggatttctgactgtatcccagacaaccccgaggaaagcagctatgggaaaccgtcacgggcgagttcgcgtcggatcatccacgcagatatctgcccgtgacgctgtcaggacaggcacggaccgtttccggtgttccctcgcatacgatgcgaccgccggccatgcctccgcccggacccatgtcgatgagataatccgcgttcgcgattacatcaagatcatgttcgattactacaactgtcgccccagaagccaccaacgagtcgaacacgcgtagtaataccagcacatccaacgggtgtagcccgatcgtcggctcgtcgaacacgaataccgaaccggactgtccgcgtcccatttcgctggccagcttcagccgttgcgcttcgccgcctgataacgcaggagtcggctcgccaagtgtcagataccccaggccaagctcatgcagtgtggccagtttcgatcgaacggggcgtaggaaatccaatagaggcatcatctcgtcgacgcttagcaacatcaattccggcagtgaacgggcgacgctgtccgcgcaaaccaatcgaatgtcatcggcggtctgtgcataccgtgtcccatggcaatcgggacacgtgacgtcaacatcgggcaggaactgcacgtccaacgaaatggtaccggttccatcgcaagtggagcagcgcaacttgcccgtgttgtatgagaatgcgccaggtttgagattcttcttatgggcatcggaagtcttcgcaaacgcacgacgcagatcatcgtgaacaccgcaatatgtcgccacggtcgaacggatgtttgctccaatgggcgtggcatcgatcagttccactttcgaaatgccatccgcgtcaatcagacgaatcgagctcggggaaacggtaccatcagcggccgagcgcaacgcagggaccagtgtctccaataccatcgtcgtcttaccggaacccgacacgccagacaccacagtgagacgtcctcgcggaatgtccaccaataacggatgcaccgtatgcacggtattcgtctccaaatgaatccgacccttggcgaacatcgcatctaagtcaatctgcggccgcgcccgctcatgtattttgccaccatcacgcagaaaaggcgctatctgagaaccaggtgccgtcatagcatccgccaccgcaccctgagcgatcacatgaccgccttcggcaccggccgttggacccatctccaccaaatgatccatcgcggcaagcacacgggtatcatgatcgaccacaaccaccgaattgccgtcagccaccaaatcgcgcatcacgcccaacagtccatccacattcgccggatgcaatccgatagacggttcatccagcacatacagcacgcctgtagtgcggttacgcaccgaacgggccaactgcacacgttggcgctcgccggtggacagtgtcgcacctgcgcggtcaagcgacaaatagcataatccgagttccacgagccgctcggccgtatcctcgaacgattcgcagatggctgtggccatcgcacgcatctcctgcggcaatgacttgggtactgaacgcacccaacgtatcgtttcgtcaagtgtcattgccgtggcttgtgccagattaataccgagaatctgcggttgacgagccggctgtgaaagcctcgtaccggaacaatccggacatggttgctcgctgaggaatctcgacacgcgtttgatacccttctcatccttggctttggcgagcgcgttctccacggtatacacggcgttgaagtacgtgaagtcaagttcggcgaaatcattgcctttcttcggtttgtatagaatatgcttcttgacggccgggccgttgaacacgatgtcccgctcggcgtcggtcagctggttgaatggaatgttcgtgcgcactcccatcgcgccgcacacctgcttcatcagatcccacatcaacgatccccatggtaatactgcgccggcgtcgatgcttttggtctcgtctggtaccagggaagcacggtcgacggttcgcacgatgcctgttccggagcaggtcgggcatgcgccggcggaattgaacgacagctgttcggcggatggtgggtgcatgagttgattgcaggatgtgcatcgtataggcaactcggccgccacgttcattgtgggacggttgcgttcgccacaatgctcgcagacatgtgaggcgcaacgggagaacaacagacgcagactgttgagcagctccgtcatcgtgccgaacgtggaccgcacgccgggcactgaaggtctttgatggagggcgagagccgcgggcacatgacgtatgtcgactacctgcgctcgactcgcttgggtgagacgtcgcctggtatacgtcgacaaagcctccagataacgtcgggatccttcagcgtatagcacacctaaagcgagagagctctttccggacccggagataccggcgatgccgactaatttgttcaacggaatgtcgacgtcgacgttcttgagattatgtacgcaggcaccgcgcacttcgatgcgggacggcgggaaagctccagatgattgttccatacccactacagtacctgtgtggcggaaaacacgcgggcaggggaaccttgttcgtcatggtattgctgcaattgtggtatctgatccatatattcgaccgcaacggaggggatgccattgtttttcacggctaccgtcagcgtacgtgaatcggaaggcgatgcggtggaatacggggaaatggattgggaaaggaaagaatcatatacatcgtatatatcaatgggaagaagttcgccggggagcggaaccagagtctgttccccggcgcagggcggctaacaagcgaatgcccagaacatccgcataaggcgttgatgggcttatccgccgtgtcagcgtgttgaacgatgtatcatgccgctcaacgtgatgataaggcgttggcgcccttgcctttcgtggcgagcgtcacggcgatgatggacgcgagagcgacggcgtacagtacggtgatgatcggaatcagcgcgctgtacgcatccgtcgcatgagagacgacgaaggatgccaactggttgccggacaatccggcgaacgcccacgcgctcaaagccagtccgtgcacggtggacactgacttcatgccaaagtgctgctcaagcagcaccggcagcgttgaacacggcatcgacggtcaggatgacgctgatgcttcccgcgatggccttggccagaccgaatcccgcgacggcgatgccggtggcgagacctttggcgaaccacagcattaggttcttcaccggcgtcagatagccgacgcccaatccaatgcccatgattacgccatagaagatgagcacgccgggggcatcctgccgcgatactggctccggtaccggcgaacctgcaggcgaagcagaccgttgagatcaaagccgatttcttgatgtccttttcgacgaagggtccaaggaaggcggccgacatgccaaggatgttgattggccatgtaatattcgttcctctctgttgtttgttcgccctgcgacgaacaaacaacaagataatggtgaagtatttcgtggccttgagcgtgccgggaggcggcagaagtgggtaagccgttgatttcattggattttccaacaaatgaacattgtgtatgttcaccttggggataagcatgaggaaaatctcatgtgaaccttgacacagttttcatggctcacaattcgaatgcgcgtttgatgaaggcattgacggtgttccaatacagttcgggatccacgacggatgcttccatatggcgtgcgtcgggaaccatgagcttttctcgatcgatgctcgagcacgcttcgtaattgatcttgagaaaacgtgagctcacgatgtcgtcctgttcgccatgaatgaacagcatcggaatgacagtatgtctgagcgactgcagacaggtggcttccgaaaaatcgtaccctgcataatgtttgcagaacaatcccgcggcatccacacataccgcggcaagcggtttcggcagacgcgacgaatgccgaaggctgtcgatgaacaccatgcgcgcagacgtgtagccgctatcgacaatcgcggacaccacattgcgcggcagacgcgggtctcccgtcgtcatcatcaccgttgccgcgcccatcgaaccgccatacagcaggatacgggcgtcggcgtcactcgacgcgataaggtcgatccaattcagtagatcattgcgttcaagccagcccatgccgacgtaccgtccctcgctcaagtcttgggcacgctgtgacggaaccaatacggtgaagcccatgcgggcgtaacgatgtgcccatttcgcggtttcctccggtacaccggtataaccatgcatgcagattgcgtacaggtgtggttttggtgcagtgcaatccggatcgaacagccatccatgcagtcgaagtccatcatcgctggtaatcgtcacaggctgtttggcttgcgcgaaccattctcctgcttcctgtgcctcaccctgctgaagttttgcgatacgctccggcgcaatcagcgattgatggaaaacggaacgtttccattgcgtatcgatgcagaaatggaacaggtatttcgcagtcgtagccaacgatgcgatacaggcagccgtcacggctcccgtggcgatgcaaatgtcgcgaacgattgtgtcattgtcatgcttcattgctgtctcgtttccttgcgattgacggattgttcacaattactatcgattgtacgtgcgtacggcgttttcgtgggctttgacagattttttcatttttgatgtgagacgtttttcgataatgtccgccctcgccgtatactggttaactgttgtcttggcgagggaagcgtatggcttccgtaatcgactcggcgtgtgattgtaggctccttgtgggttgattcacggctcgttgatgcgccgaaacagaatgaacgaataaagcataaggagaaatagcccatggctaccaccattaccctcgaaggcgctgcccgtaccgagttcggcaagggcgctgcccgccgcatgcgcgtcgctaaccttattccggccaccgtgtacgcaggcggcgaagagccggtcttcgtgcagctgccgatgaaggaaaccaccctgtccctgcgtcacaccaacgctctgttcaccatcaagttcggtgacgagaccaagatggccgtcgtcaaggacgttcagcgcaacccggtgaagcgcatcgtcgagcacgttgacttctacgaggtcaaggccggcgagaagatcgacgtcgaggtgccggtgttcgtcgagggcaccccgaagggcgctgccgtcgcattcgtcgacattcaggagctcaaggttcgcgccgatgtcgccaacctgccggagaagatcgtggtcaacgttgacggcctgaccgacggttccaaggtcttcgccaaggacgtcgtgctgccggaaggcgttgtgctcgacgtcgaggatccggaagagtccgtcgtcaccgtcgaggtgccggaagacgctgccgatgaggctgctccggtcgaaaccgctccggctgaaaacgctgagtgagttcagatagcttaaggaagcaaacttccattctacggttttgaacaaccgtaagagatgatgaaaagcccatgtgctcagacgcgcatgggctttttcatacccggcaacacccgttctatgagctggaagacataagagactgacggcaaatcctgcattccttacgcaatattgatacaacgggtggatacggactatactcgcctatacgttcagtgaacccgtatggcactgtcgggtacgaagggagcgattgcgtactgccggagacggactgcgtgacgatccgttttcccggcagccatcctgatgccgcacattaatggactatatcgagaatcatcatttgacggtggtaggcttcccacgtgagatcacactgatcgacaatgatctgacgtaggattccagcaaatacgtggcatgcatcagcattccaatcgaataacgactagcatgactgacgatgcatggaaacaatgcacgagagacgaagtgagacggtgcggaagagagaaacatttgaataagcatattattcggcttgatgtggtgacggtggtattccttggcggatgcgtcggcactggactgcggtatgcgagctcgtccattgcggacgtgggcggcttccatgtcggtacgttcgcggccaatatggtggcctgcttcgtatatgcggcgctttccgcatggctgggatcttccagcctgttgaaaggccgtgcaaaagaatacgtgaatcgtggattcggcatgggcatgtgcggaggcctttccaccatgtccacgctcgcattggaagaattcatgatgattgacgatcacgcgattcccggagtcctcacctattgctgcgtaacgttcattgtcggtttttcgctcgcctacgccggtgccttatgcggttcgtggttggcggaacgaaacaaagacgaacatgctgacaaggaggcgatccgatgagcgcaatgcttgcgatcggcgtatgcgcatgcggtggcgtcggcgcgaccgcacgctatatctgcgattcgtatatcaaggcattgtggcgcaaaacgttcccgctttcgacgtttgccatcaatgttgtggccggtctgcttgccggcttggtggcgggattgttcgcggcgaacaccataagccccgactgccgcctactgctcgcaacaggatttctcggcggtttctcaacgttctcaaccatgatgaacgagacggttacgctcctgcgcaatgggaaaatcgcttgtttcatcggttatgctctggcttcgatcgtcgtgcccgtcatggccgttgcgtgcggttactggctggcctgagccaacgtaaacgtgattccaaaatcacgtccgaatgcagagactggcttcagtccgcgcgtagcatgcaaccacgctcggggctatgggaatcacgtataccgatgaaaagaagttcaccaaagaacagacgcagcaactgttccgatccgtaggatgggtgtcaggcaaatatccggaacgtctgtacaaggctctgatgggatcgtccaccgtgttcagcgcatgggacggtgaccgcttggtaggcttggtgcgcgtgctcgatgacactgagatggtggcttatatgcattacgtgctggtcgatccggaatatcagggtcatggcatcgcaggccacctggtgggcatggtcaaagagagatatcgcgactacctttatattgaagtcatgccggaagaaagcaagaacgccaccttctaccagaagcacggcttctcaatcatggaagacggcgcggccatgcagatctgcaatccgggagaacgccgctgaaacaagcatcgtgacgccaacaatcttattgcccccgtctaatgacgggggtattgctttttcgagtatccgccaatacatcggagggttggcttgcatgcttcacccgaaaggatcgcagcatgactggaagcgacgaacggaacacgcagaacgcgacgagcgttgggaaggctgcgtttccagcgccttccgccatgaagtctcctcaccccaataggcgacagcggcatgttgtactacgacgtcgaaactacttgccccatcattctcacccacatcccgctgtcagagacctgaacgtcataatggtgttttggggaatgaggcacagtcattttttgaacaattcagaatacgttccgagtctatagagcatcaatcaggcgtgagggcggcgactttttcgcaggatgtttcttcctatctcatatcgcgaacgcttgtaatcgaaagagattatgatgtgggaaagttactaaccagaaccggtgccacaagcactgggataccaacaaccgcgggccgctttcgggtggctgcaacaagaagaagtaaagaatgactgaacagaatcatcacgatccggcagagcttgacaagcttaccgagaagttcaccgtgctcccgaacgaaaacccggcatccgacgccaaacgtgccgaactcatcgacaagccggcattcggtcaggtcttctccgacaacatggcccacatgacttggaccaagggcgaaggctggggagaccgccgcatcgagccgtatgcgccgctgaagatggatccgggcgcatccgttctgcactatgctcaggaatgcttcgaaggtctgaaggcctaccgtcatgccgatggctccacctggctgttccgtccggatgcgaacgccgagcgtttccagaactctgccaagcgtctgtacctgccggaactgccgatcgacgatttcatcggttccgtggccgccctcgtcaagcgtgacgtgaactgggttccgacccgccgcgagtacaccctgtacatgcgtccgttcatgttcgcttccgagccgttcctcggcgtgcgtgctccgcaggaagtggactactgcgtgatcgcatccccgtccggcccgtacttcccaggcggcgtgaagccggtcagcatctgggttgaagacaagtggttccgcaccggccctggcggcaccggcttcgccaagtgcggtggcaactacgccgcatccctgctgggcgaatacaccggcatcgaccacggctgcgagcaggtctgcttcgtcgacgccgctaccaagacctacctcgaggagcttggcggcatgaacatgatggtcgtgcacaaggacggccacgtagagaccccgtctctgaccggcaacattctgccgggcgtgacccgtcgctccctgattcagctcatccaggacaacggccacgacgtggtcgaaaccatgattgctctggaccagttgctcgaagacatcaagtccggcgaagtcaccgaggtgttcgcttgcggtaccgcagccatcatcaccccgatcggtcgtttcaagtccgagaagttcgacgtgaccgttgccgacggcaactccggcgaattcaccgtgaacctgcgcaaccagctgctgggcatccagcttggcgagatcgaggatccgcataactggatgtggaaggtctgctgatttttcgcgactgacttatagttcaaagtccgccgaggggcggggaacatggtattcgacacactcaaggccgttcggccaagcctacggtcgaacaccatgtttcccgcccctcggcttattgtgtacgatgggaagtcgcgaaatccgagagtgagggaagtgagggaagggaaaaggatgggaaagcatgtcggtggcgttggagagtaatgccttcttttgggggattgaatatttggcgacgttctgctgcggcatgtgcggcggacttgccgccgtgcgcaaaggctacgatatcttcgcgattctcgtcaccacatggctcaccgcattgggcggaggaatcatccgtgacgtgctgctgggcatcgcgccaccggtaggcgtgtcggataaaggactggtgatcgttgctctgctggcttcggtggccgtcgcggtgtgccatcccgaaatcaacaggctcaaatggtccatgctgtcgttggatgctctggcattgggattgtatgcggtcaacggtaccagcaaagccatgatgtaccacacgtcaggcatgaccgcggtttttcttggcatgttcaccgcgcttggaggtggcctgattcgagacatgctcatcaacgaagtgccgatggtgattcgtgacaaacattggtatgcggttccatctgccgtggggtgcgtactgacggtgcttgtctgcaaaggcgtggacgctggaatcgtcagttttccagccgaagtggtgcttgatctgctgatcgtcgcattgatggtcagcatgcgattggtatcggtgattttcgacattcagcttccgggagcgttggtgcgtcataatacatatctgccaagtgaagcgaaatatttgaaacgaccggtcattcattctgataaggattccgacaaacgcaagtgtgacaagcgtaggtagcgacagtgagatggtaattaaacggaagacatttgcgtaacaaaaaatcccgcaggaaaaacctgcgggattttcgttagctgtgagcttctaaaactcagagagcgttgatggccacggcaagaccggacttgcggttagcagcctggttcttgtgaatcacgccagcgccagcagccttgtcgagcttctgagctgcgaccttgtaggcggcttctgctgcggacttatcgccggcggcgatagcttcacgggtggcgcgaacggcagtcttcaggctggacttcacggccacgttgcgcttgtgggccttctcgttggtgagaacgcgcttcttctgcgacttaatgtttgccactatttctccaaacgacgttttctataaggacatacaaacgatgatgataacatggcgcgcggataaattgccaacgggcttaggagtgtcgcgactcaccatgccgatactagcagttagaatcgtttgcgtcgaatatttcaagaggaggatggcgtgggccagcagcataaccagcccggtttcaccgatcagtcgttgattcgcaatttctgcatcatcgcgcatatcgatcacggcaagtccacggtggcagaccgtattctgcagctcagcggcatcgtgcccgaacgtgagatgcgtgatcgtttcctggatcgtatggatattgagcaggagcgtggcatcaccatcaaatcgcaggctgtgcgcgtgccgtggacgttcgacggcactgaatataccctcggcatgatcgacactccaggccacgtcgatttcacttatgaggtttcccgcgctctcgccgcatgcgaaggcgcagtgctgcttgtcgacgcgacgcagggcatcgaagcgcagaccctgtcgaacctgtatatggccatcgaccatgatctggccattattcctgtactgaacaaaatcgatcttcccagcgcggaaccagacaagcataccgaggaaatcgcaggcctgattggttgcgatccttccgaagtgctgcgcgtgtccggtaaaaccggtgaaggcgtgaccgaactgctcgaccgcattgttgccgacgttcctgcaccaaccggcgatccggaagctcccgcgcgtgcgctgatcttcgactccgtctacgactcctaccgcggcatcgtcacctacattcgtatggtcgatggcgagttgcgttcccgtgagaaactgcacatgatgggtatcggcatgacccatgatccgattgaaatcggcgtgatcagcccagacatgatgcctacgaaggcgcttggtgcgggtgaggtcggttatgttatcaccggcgcgaaagacgtcagccagtccaaggtgggcgacaccatcacttccgcgctcaagcctgcggccgatccgctcgaaggctatcgtgacccgcagcccatggtctacgctggcctgttcccaatcgacaacgcgcagtatccggaacttcgtgaggcgctcgacaagctcaagctcaacgacgcggctttgatctacgagccggaaacgtccgtggcgttgggtttcggtttccgctgcggcttccttggcctgctgcatatggaaatcgtgaccgaacgactgagccgcgaattcgatctcgacttgatctccaccgcaccgaacgtgccatacgaggtcaccgcggaagacaattccgtgcatcgtgtgaccaatccgagcgaattccccgacggcaagatcaagcagatcgtcgaaccggtggttgccgccgacatcatcactccgaaggaattcatcggcgcggttatggacttgtgccaggaccatcgtggacagatgggcactatggaatatatttccgccgaccgtgtggaaatgcattatcgcattccgttggccgaaatcgtgttcgacttcttcgaccagttgaagagccgcaccaagggctatgcgtcgctcgactaccatgaggacggcgaacagtccgccgatctggtgaaggtcgatattctcatccagggtgagaaggtcgatgcgttcagcgccatcgtgcataaggataaggcgtattcctacggcgtgatgatgacgaagaagttgcgtgagctcattcctcgccagcagttcgaaattccgattcaggccgccatcggctcccgcattatcgcacgtgagaacattcgcgcactgcgcaaggacgtgctcgccaagtgttatggcggcgatatttcccgtaagcgcaagctgctcgaaaagcagaaggccggcaagaagcgtatgaagatgctcggccatgtcgaggtgccgcaggaggcgttcatcgccgcattgtcgaccggagacgcaggcaacgaccgcgacaccaaagacaagattcgcgccgcccagaaaaccgaaggctgatgttcgaagcctacattcatgtgccgttctgcatacggcgctgtgggtactgtgatttcaacacgtataccgctgtcgacatgggagcgggcgcttcgcgtggcaattacgccaatatggtgattcgcgagatgtcaatcgtccatgattggcagatcgcgcatggcgttaacgaaccggaagcggccaccgtctttttcggcggtggcactcccacgattctgaaagcctcggatctggtcgccatgttgaatgccgtgcgtgacacgtggggcattgccgacaatgcggaaatcaccaccgaagcgaatccggacacggtgaacgccgattacgtgaaggaactcgcggacggcggattcaaccgcatctctttcggcatgcagtcggctgtgccaagcgtgctgaaaacattggatcgtacgcataccccggccaatgtggcggcgggaatcgcagcggcaaatgctgccggcatgcgttccagcgtggatttgatttacggtgcgccgggggagagtctcgacgattggcgtgtttccgtacggacggcgatcgacttgggtgttgaccatatttcggcatatgcgttgaccgtcgcaccgaacacgaaaatgggacgtcagattgctgttggaaccttgcctacgcctgatgatgacgatgaggcgaccaagtatgagattgccgacgatctactgagcgcagccggtcttgaatggtatgagatcagcaattgggcacgtcctggttatgaatcgcaacataatcttggctattggcgcaatgttgattgggcggggctcggtcccggcgcacacagccattacggcaatgtgatggatgttgaacagtccgcgtcggctgaaacatctgaaacggtcaaatcgtcgggcttgcgcagctgggatattgcgcatcctcgcatgtgggggcaggctatcaacgatgataatgtgccatggtcgggaagcgaacgaatctccaacgaggagaacctcgaagaaatcatcatgcttggtctgcgcatacgtgagggtctggatttgagtcgccttggaaacatggttgatatggctcgcatccagcccatggaagacgaaggccttatcgttatccgtgacggacgtgtgattccaacccgaaccggacgcttgctcaacgacaccgtcatcgagcgtttcttcgacgcctgctcgttgtaatgccgataatcctctgacgaattggttttagatgatccatcttggtatgggtggatacagtgtgcagattgaaacgggcctcggatgcaggttgttgcattccaggcccgatggcatagagcctagaacgaggctgtcaccggatgttcgtaatcagcgcatcgtgagtccgccatcgacatgcaacgtctgaccggtgacgaaacgagcgtcctcgccaaccagcatcgccacaccgcccgcaatatcatcagccgtggcaagcctgcccaaaggcgtctgcgcgatgatgcgctcgcggacgtcttcggtggtggcgcggctcgaatccgtgcccacggtcaaaccggccgcgatggcgttcaccgtgacgccccacgctccggcctcctgcgccagcgagcgcgtgaatccgatgagtgctcctttggctgcgatgtagtcgtggtaggggacgatcgggctgtctacgaggttgctggagatgttgacgatgcgtccccatgattggcgttgcatgtagggcagcgcggtcgtgcaggtgttgtaggtgcctttgagacatccttcgagttgggtcgcgtagtcgttccagctggtgttgctgaaggtgttgcggttgcgtgggtcgaacgagtagtggctgagcgcgttgttgatgaggatgtcgatgccgccgaaggtgttggctgtggtttgtgcgagttcgttgacttgggtttcgtcggtcacgtcggctttgcatgtgatgacgcgtccttgtgcgtccgcttcgttttcgatgtgttgcttggtgtgttgggcgcgttcgtcgttgcttaggtagtcgatggtcacgttggcgccgagttgtgcgagtctgagtgcgattgcggcgccgatgcctcggcttgcgccggtgatgatggcggttttgccggtgagtgtccggtgttcggattgctggttcacgtaaggtcctttgggattattcgtagtcgatgtcgaaggtgtcggcgtaacggtcggtgttgcgttcgatgtcgacggctctgacgaggtcgaggatgttgaatccgccgtcgtggtgccatccggatttcgcgcggttcatttctccgacggggcagatgcggtcgatgccgtattcgcccacttgttgcgcgagtgcgaacagtctggatgagcttgtggcgatcgcgcaggtttgcagccactcgcggtagggtttcagtgtgggcagcgcgtgtttgagttggtccacggcgacgatgttaatggtgcggttgagcggtgtccccaacgaggggagactgctggtattggggtagtagagcacggtccagtcggtgccttgcggcgattcgatgacgaacggtgcctgtgggtcggcctgtgcggcgctgtctggagtcatggacgtcatgaacagcgcttgcatctcggtttgagagcgtgccctgcggatggcgagggattccgtgtcggaaggggttgatcgtggatatttgcgttgttgcgagtcgagctcgctggcgagcagttccgccgtctgagcgggggagatggctccgccgcgttccacgaagatggtttgcggcgccaggcagctttgctggtcgtaggtggccacgtccacggccatacggtgcacggtttgcacgtgagtgtccgcgcgtagcgcttcacgtccgatgagtgagaagccgatgcgtgcgccatagctgaggaacggtttgcccgcgctcacgcgtggacggatcgcctcggtggtgtgcgacgaaccgtaggcgatcacggcgttcgcttcgccgatcgccacgtcttcaagctctaccgtgccgccgcgccacggcactatggccaatacgtcggcgagatccgggttgatctgtgtcagagaacgagcgaacagtacgggcatcagcggttcgtcgaacgatgatttgccgatgatcgcgcttttcgtcagcagactcatggtcatgctccatacgggaatgccgggaacattgctggaaaacacgtggaatgtcaagtccggcccgtacaggcgcgtgtatccgccggacttgttcggtcggtattcgtccagcatgcgcgggcttggcagttcgtcatcaagaaaacgcaatagttcgcgtctgcggaacatgcgcatgtaacgtttcagttcgatacgcgtcatcgtcgcgtcatagccggtgatggagggaatcagagactccgctatctggcgaccctcataatcgggattcgtccacaattccaccgcctcgccgatgatgtcgacgatgtgttcgacggaatatgctgccaatgtctgcgatcgattgcaacgcgttgtctcgcacaaatcttggacagtctcaggcgtgagtaccggataacgcaacgtgacctcaccgcggtcggtgagaacgccgcgtgtttcgaaatcctcaaatacgaagccgcgcggcgcatggaaaatgtcgatgacgctcatgcgtttgccgccatcacctcgtcgacggcgatggagcagccgcgtgcctccgcacccttcgcacgaccgttgagctcgtaaccggaatcggtgcgcacgccaagatcttcggtcagaatcgccagacaggaattccaattcgccaaatcgtaatgcgcgatcaccccctgctcgccatcggcgacaggcgtgagcgtcgccggatcgaggaacacggaacgaacccacgacggcgtcgccttcagataattcgacgaaccatccgtatagtacgacagcagattctgatcgtaaatctgcgaactcaactccgtcataccgtacatgttcacgcaatgcgtgcgtgcgacgccaaacacctcaaggaacttcgcatacaaatcatcgacggtcatatcggttttcgtactcttgaaaccaccggtatcgaaaacacgcgaatccttcgccaacgcataggttttgccccgctcggcaagatagtcaagcagatacagatacgcggacgaagcgcccatcagcatcaccggctcgccgtctgccaccgactgatcaaggaacttttccacaccagcgaagtccaaaccatcctcatggaagaagaagccgctgccctcgctgccgcactgctccaccgcacgcgtcagataacgggccaacgaaccattatgattcatctcccaggcaggggagagcaccgcgatacgcatgcgctcacggtcaggcatgatgaaatgacggaacgggccgatcatcgacgcatcccacacctcaagatcaggatgatagttgcgtccacgctgacccggatgcgtagtgccgctggtcatgaacactgcctcgcaatcatcttcagacaccgaagtgagcgtcagcatcttgaacccatccaccggcatcggcggaatatccatccaatccgacaacatctgcggagtcaccctacgagacatgcaatacgcgcgatactgcatgttatgggcaaactggaaagcgaaaatcttatgtgcgagcgcgtcgaacgcctcatccggagcgacctcgcaaccatacttttcgatgaactcaagcacgtttgccttgacttcctgcgcgtcggcacccaacgacattgatgtcatatgcggtattcctttctataaacgatactgatattcgaaagcaaatcagatctgcgacggaacttcagcttcgttgtttcctttacgacgattgatcagattcggcaggtcgatcagcagtgccttgagaatcaccacacagaacgccccaaccagaatcgaattggagaagaacacgtgagcgccgccctccaagccgctcaacgcgctcggcagcgcgatgcccaacagcagggacaatccaatgaccgcctgggaacggtcgttcgactccaccttgcgcagcgtattgaagcccgtactgatcaggcttgccgcggccggcaggaaaatgccgccgatcacaggggaaggaatcaacgacaataccgctccggccttcggaatgaaaccaagaaccacaaataccacgccggcgatgatcaccggcacacgggtacgggtcttgccctcatccgtgaccttaagcaacgcgacattctgcggatacgcggtagtggtgaaaccgccgatcagcgaagaaatcgcggaaccggcagcctcgccggccaaaccataacgaacctgacgatcctcaagcttgacgccctggatctcactggccgcctgatacacgccaagcgcctccataatcgcaaccatatatgcgatgaagaacggcacaaacaccgccgcatcaaagtcaaaaccgccatacggcataatctgaggaagaccaaaccaaggcttcgacgcgacaccggaaaaatcagccatgccaaataccatcgaaagcgcagtgccggcaaccagagcaatcagataggaaagcgccctggccatacccttgccgaactgggaaagcgccaccaccagcacgcaagtcacgatagacacggccaacgtcttcggatcggcaaaaccatcatcgccgggagcgccaccaagaaactcgctcaacgtgaaactcgacagcgaaacgccaaccagaaaaataatcacgcccgacactatcggcgcgaacagaaaacgcatcttctcaatcacacgggtcagacacagcaccaagaaaatcagcgaactgacaaaaatcgacgtaccagcggcagccaacgaaccagcagtgcccgcagcgatcatcaacgcatcgaacgcggcggacggaccctgcacaatcggcaaacgcaccaacctcgtggcctgaatcaatgtgaccaaaccagacacaatgaaaatggcattcaccatatttgacgacaacgccaacggcaagccaatggcaccagccacaaacaccggatcaagccacacattggacaccaacacatgctgcaaacccagcagcacattcttcggagtcaacttcttcgaacccgaaccaagctgctcaggcacctgcgacgcatcagacacgccaaatcccttctctttccacgaaacacacggccaaacaccagccgtcagcacagagaagacgcgcacgcgcaccgttcgtaacatccctacgcaggcactaccctgttcaggtcataagggtccgggcaaacgcccatctcagccacatcggctcccctgtactcttcggacaaccaccagcataacgacacgcatcgataccggcaaccaccacaacccaacacatatcctccacattttcccaagaaaaaacagtcttgacttttccgagtattcgttatatggacacgcgaaacgtatttgatacaggggcgcggtattctaaaccacgcattaaagaaccgcaagacttttcttgcccaaaaacattgaaggtggtttcggtgactttccacgccccgttagatctcacgatccatgattcccaaggtatgtacgatcccggcgccgagcacgacgcctgcggcgtgggtatggtcaccaccctcaacaagcgccccgaacgcaaaatcgtcgacgacgccatcgaagtgctcgtcaacctcaaccaccgcggagccgtaggcgccgaagaaaacaccggcgacggcgcaggcatcctcatgagcatgcccgacgaattcatgcgcgccaccgcaggcgtcgaactgcccgaagaaggccactacgccgccggcatcgcattcctcgaccgcgacatcgccacctccggacaacaagaacaagccatcgccaaaatcgtgcgcgaagaaggcctcgaagtactcgcatggcgcgtcgtacccaccaacccggacggactcggactgcaggcgctcgccagcatgcccgcgttcaagacgctagtcgtggccgaccccgaaggccagctcgcaggcatcgaactggaccgcaagaccttccgcatccgcaagcgcgtcgaacacgaggtgggcatctacttcgcgtccctgtccgcacgcaccatcacctacaagggcatgctcaccaccatgcagctcaagcccttcttcctggatctttccgacgagcgcatgaaggcgaagatcgccatcgtgcactcccgcttctccaccaacacgttcccgagctggccgctggcccagccgttccgccagctggcccataacggcgagatcaacaccatccagggcaaccgcaactggctgtccgcacgtgaaggccgcctaagctccgaactgctcggcgaattcaagccgctgctgccgatcgctaccccgggctactccgattccggcacgttcgacgaatgcctcgaactgctgcacctgtccggacgttccatgccacatgccatctccatgatgctgccgccggcatgggagaagaacgaccagcttgaccccgatgtcagggcgttctacgaatacaacaatacgctgatcgaaccgtgggacggtccggcgcacatcatcttcactgacggcacccaggtcggcgcgctgctcgaccgcaacggcttccgccccggccgctggcagcttaccgacgacggctacatcgtgctcgcatccgaaaccggcgtgctcccggagaacgccgaggaacacatcgtgtccaagggccgcctggaaccgggcaagatgttcctcgtcgataccaaggaaggccgcatcatcccggacgaggagatcaagaagtccctcgcgtcccagcatccgtaccgtcaatgggtcgaaggcaacaccgtcgagatgagccagctgcccaagcgcgagcacgtcaaccactccggccagtccgtgcaacgccgccagcgcgccttcggctacaccgaagaggatctgaagctgctgctcgccccgatggccaacaccggcaaggagccgctcggatccatgggcaatgacgcgcctatggccgcgctttcctcccgcagccgcatgctgttcgactacttcacccagaagttcgcgcaggtcaccaatccgccgctcgactgggagcgtgaaaagatcgtgacctgccttgaatccgccatcggtcccgagccgaacctgctggccgattccgaactgcatgccaagaagatcctcattccgttgccggtgctcaactccgacgagatggcgcagctcaagcgcctcgaccgcgccaagatcctcggcggctactataagccgttcgtcgtcaagggtctttatcaggtcgctggcggcggcaaggcgctgaaggaacgtctcgacgagatcttccaggaagtcgacgaagccatcgaaaacggatccaacttcctcgtgctctccgatcgcgactccaactacacgtggggaccgattccgtcgctgctgctcacctccgcggtgcagcaccatctgctgcgcagacacacgcgcacccagatctccatggtcgtcgaggccggcgatgtgcgtgaaatccaccatgtcgctctgctgatcgcctatggcgcggcggccgtcaacccgtatctggcgttcgaatctgtcgaagacctgtcccgcaaaggctatctcaacgtcgatgccgaaaccgcggtgaagaacctgaccaacgcgttgtcgaccggcgtgctcaagatcatggcgaaaatgggcgtctccaccatcatgagctaccgtggcgcacagctgttcgaagccatcggcctgaacaaggacgtcatcgacgaatacttcaccggcaccacctcccgcgtcggaggcgtcggactcgacgaactggccgaagaggtcgccatccgccatcgcgtggcctacccgtcgcagtggaccgcccgcccgcaccgcaacctgcgcaccggcggcgaatacaagtggcgtcgtaccggcgaagaccacctcaacgaccctgaagccatcttcctgctgcagcagtccacccagcgcggtgactacgacatgttcaagaagtactcggcgcacatcaacgacacctccaaccgtttgatgacgctgcgcggcctgatgaagttcaagtccggtcgcaagccgatcgacatcagcgaggtcgaaccggccagcgagatcgtcaagcgtttctccaccggcgccatgagctatggctccatctcccaggaggcgcacgagaccctcgcgatcgccatgaacaccatcggcgcacgttccaactccggtgaaggcggcgaatccgaagaccgcatcaatgatccgctgcgctacagcaagatcaagcagatcgcatcggcacgtttcggcgtgaccagcgactacttggtgcacgccaccgacctgcagatcaagctcgcccaaggcgccaagcctggcgaaggcggacatcttcctggagccaaggttccgccgtggatcgccaaggtgcgtcacgcgactccgggcgtcgagctcatctccccgccgccgcaccatgacatctactccatcgaggatctgaagcagctgatcaacgacgcgaagatggccaatccgaaggcccgcgtgcacgtcaagctcgtttccgagttcggtgtgggcaccatcgccgcaggcgttgccaagtgccatgccgacgtggtgctgatctccggctacgacggcggcactggcgcggctccgctcaacgccatcaagcacgccggcaccccgtgggagatcggcctgtccgaaacccagcagacgctcgtgctcaacggcctgcgttcccgcatcaccgtgcaatgtgacggcgagctcaagacgggccgcgacgtggtgatcgcagccctgctcggagccgaggaattcggtttcgccaccgccgcgctgatcgtcgaaggctgcgtcatgatgcgcgcctgccagaagaacacctgcccgcagggcatcgcaacccaggatcccgaactgcgcgcacgcttcaagggcaagccggaacatgtcatcaacttcttcatgttcatcgccgaggaagtacgcgagctgctcgcccagctcggcttccgcaccttggaagaggccgtcggccatgtcgaatgcctcgaccagaacgaagcgatcaagcgttggaagtctgacggcatcgacctgagcaacgtgctcatgcagccgggaccggtgccgggaaccatcctgcaccagaccatcgagcagaaccacgagctcgacaaggcgctcgacaacaagctcatcgagctcgcgcagcccgcccttgagaagaaggagccggtgcgcatcgagatgccgatccgtaacgtgtaccgtacgctcggcaccatggtcggctacgagatcaccaagcgttacggcgaggaaggcctgcctgacgacaccatcgacatgacgttccatggtgcgggcggccagtccatcggcgcgttcattccgcgtggcgagaccatccgcgtgtacggcgaagtcaacgactacgcgggcaagggactttccggcggacgcatggtcgtgcgtccggaggcgggcatcgccttcgatccgcatgagaacgtgatcgcgggcaacgtcaccggcttcggtgccacttccggccagatgttcgtggcaggtcgtgcaggcgaacgcttcggcgtgcgcaacggcggcgccaccttcgtggtggagggcgtcggcgaccatggttgcgaatacatgaccggcggcaccgtcgtgatcctcggtcccacgggtcgcaacctcggcgcaggcttctccggtggccacgtgtacgtgctcgaccttgacatgaagcaggtcaacccggctgccgccgccaacggcgcgttgctgttcgaaccgctcgacagtgagtcgaacgaaatcgtgcacggtctggtcaagcagcatgccgaagaaacaggctccgcattcgcggccggactgctcgccgactgggagaacgcatccaagcgattcacacacatcgttccgaagcacttcctcgccatgcagaaggcgatgaagaacgccgaagagaacaacatcgatttcaatacgcccggcgtctgggaacaggtgtacgagcaggttatggaaggagcgcgctgacatgggagatccacgtggattcctgaaggtccgtacccgtcgcgaactggccgaacgccccgtcgaggagcgaatcaaggattggttcgacgtccacgccgaatccggcctgcagccttggaccaccgaacaggcggcccgatgcatggactgcggcacgccgttctgcatgagcggctgtccgctgggtaacatcatcccagaattcaacgatctggtgcgccaggagaagtgggaggacgcgtacaaccgcctgtccgaaacgaacaacttccccgaagtcacaggccgcatctgccccgcgttgtgcgaggcagcctgcgtgctcggcattcaccagccgccgaccatgatcaagaacgacgaatgcacgatcatcgatcaggcttgggaactcgactacgtcaagccattgcctccgcagcgcctgaccgaccagaccgtcgccgtggtcggctccggcccgtccggtctggcatgcgcccagcagcttacccgcgcaggccacaccgtggtcgtatacgagcgtgatgacgccatcggcggcctgatgcgctacggtatcccgaacttcaaactcgacaagcgactcatcgactgccgcgtggaacagatggaagccgaaggcaccgtgttccgcaccggcgtggagatcggcaaagacatctcatgggacgatctgcgatcccgctacgatgccgtggtcgtcgccatcggctccaccgtgccgcgcgacatgaagattccgggccgtgaactcaagggcatccactttgccatggaattcctgcccgacgcgacccgccgcgtctacggcgtcaagccagtcaacgacatcaccgctgaaggcaagcacgtcgtgatcatcggtggcggcgacaccggatccgactgcctgggcacgtccatccgccaaggcgccaaggacgtcactgtgctgcagatcatgccgcaggaaccaagcgaacgcccggccaaccagccatggccgaccttcgcgcgcctgtaccagaagacctcctccatggaagaaggcttcgaaacccagcgcgccgagtacgtgtacagcacggattctgtgaacttcgtcggtaccgaagaggaacaggccaaggtgaaggtggagcactccaccgctactgaaggcttcgtggccgatgagaacggacatgtgaccggtctcaaggtagtgaacgttgcacccggcgaaaacggaccgttcacccgtcagcccggcaccgaacgcgtgattccggctgatttggtgctcatctccgtcggcttcctgcacccggacaccaccacgctcgtggaccagctgcccgtcgaccttgacggacgaggcaatgtggcgcgcaacgacaagttcgctaccagccaggacggcgtgttcgcctgtggtgacgccggacgcggtcagagcctcgtggtgtgggccatctccgaaggccgttcctgcgcggccgccgtggacgaatacctcaccggcgccaccgaactgccggcacccatcgtcgcatccaaaaggccgatgatgctgccgcgctgaacataagcagttaacgtaacagaaaaatcgtccgattctccgccaaaacggaatcggacgatttttcatatccccacttcccggaacctcgaacaatacagacgtggcataaacgtccgaatgacgtgccgttcggcgaaaaaccggcagtcatgcagtaaagtgaactgcagcacatcgcaacaaaggagtgacccaatgccaaatcgtgcagaacgtcgagcgcaggcaaagaacaaccgcaggggagtgccgcagcagtacgaccaaacccatggccgcgcacgttccggaatgctggacgaataccagctgcaggaaaagtcccgccgactgcaagacggtaccgatggaccttggaagccgaccggcggcaccatcgaagaaaccgaaagcctgctgaccaccagcccgaactacacgaacccgaagatgttcaaggcaccgcattccgcacgccaatggttccgcgtgatcagctggctgctcatcgcactgtccgcaatcgcattcctggtgatcatgtggctgccgtcacatcccatgtggttggtcgccacggtctccatcgtcttcgctgtcggtgtgcttagcctgttcttcacggcgggtaacccgaagcataatccgaacctcgatcagaatggtacggccgtctgatagcaaggcgatgaacgtaaagcggggctgcatccgatggaaggatgcagccccgctttcacatgcgagtcacgaatgacggcactattcgttcctggtttattgacctccttgcctgcatttttaggaaagatgcaaaactttgtgacacgaatgaaacaatcaggcgtttcattgaaaaattgccttacagtagtgatggaacaactgcctgactcgaagaggagagcacagatatgaaggttgacatcctttcccgtgaatatccgcccaaggtgtatggcggcgcaggcgtgcacgcggaggagctttccaaagttctggcggaacgcgtggatgtgacggtccgtgcgtttgacggaccacgtgccgagaatgagattcccgaaatcccgggtgacaatccgaaaggttcgctcaaggtcgtcggatacgacgttcccaaggaactccaggaagcaaacggcgcgctgaagacgttcggcgtcgatctgcagatcgccgacgatgtggacgccgacattatccacgcgcacacgtggtatgcatgcttggccggataccttgccaagatgctgcacggaacgccgctggtcatcaccgcgcattccctcgaaccgttccgcccatggaagcgtgaacagctgggtggcggctacgatttgagctcgtgggccgagcgtgacgcatacgagcatgccgaccgcgtgatcgccgtgtccgcaggaatgcgcgaagacatcctgagcgcctatccgaatcttgaccccgacaaggtggtcgtggtgcacaacggtatcaccatgagccagttcgaaaccccatccgacgacgatccgggctggaaggtgttcgaacgctacaatatcgaccgcaacaagcccacgctactgttcgtcggacgtatcacccggcagaagggcctgccatacctgctgcaggcgctgcatttcgtcgatccgggtatccaggttgtgctatgcgccggcgcacccgatactccggaaatcatgaacgaggtcaaaaccgcgttcgccaagcttgacgaggagcgcggcaacatcatctggattgaggagatgctgccgaagccggagctcaacgcgcttgagcacggttgcgacgcgttcatctgcccctccatctacgagccactcggtatcgtgaacttggaggccatggcgtgtggccttccggtggtggcctccgcgaccggcggcattcccgaagtcgtcgtcgatggcgaaaccggatatctcgtgcctgtcgaccagctgcacgatggcaccggcactccgaccaatccagacaagttcgtgcatgacatggccgacgctatcaaccgcatcatggccgatcctgaaaaggcgaagcagatgggacaggccggttacgagcgtgcgcgcgaccacttcagctgggagtcgatcgccgacaagaccgtcaaggtctatgaagacgtgcttgccgagcagggcaaaaccgccgaataaccagttcaccacgtagacgatgcgtggaacgccttccgctgaaagcattatgctggcggaaggcgtttccatatctacaagccgaacaacgataggggaggaagaatgccggagcagaacatcgcactggaactcgctgacgtggaatttcgtcgccgtggacgcgtgattctcaccaaggtcaatctgaaaatcaacaagggcgagaaatgggtgctgttcggacccaacggcatcggcaaatccagcttggttcaaatgatgagcaccagaggattcccgtcggaaggcaccgtcgacattctcggcaatcgcttgggcaaggtcgatgtgttctcctatcgcaaccgtatcggtttgagctccgcggaactgagtcgcgcgttccctccccaagaagatccgctcgacgccatcgtgaccgcattgaccgcgaccaccggccgttggcgcgacacctacaccgacgaagactatgccaaggcgcgttccctgatgcgtgaattcggtatcgaatatctcgaaggtaaaatgatgttcaaactttcggaaggcgagcgtacgcgcgtgctgatctgccgtgcgttgatggctgatccggatctgctgattttggacgagccgactaccggtcttgatttgggcggtcgtgagattgcgcttcgtgcgttgagccgtgtcggcgtcgagcagtcggatcgtgccgtggtgctggtgacgcatcgtcttgaggagattccgcagggattcgaccatgtggcgatcatgggcaggatcaccggcagcgaggccgacgcctacgccgacaatgtcgcaggcaacgatccggctccgggcaccatcgtgtactcgggtgatctggaacacggtttcacttcggaacggttgagcgaagtgttcggtttggagcttgaggtgacgcatgcgaatggacgttggagcgcgtacgcgcggtaacgggtgctgtgtgcgccggaatatgctgtagcatgaatagcgtcggacaggagtcattcggttccgtgctgtcgtgatggtggaatccgtgtgggtatgaaggagtgattgatgcgtcgaggaccgttgacggcgggtgagaaggtacagttcacggatcgcagatccaataagatcaccgaccaattggtgccgggcggtgtgacgcagacctcgcacggcatcattctgcatgacgatgtgatcgggcagtcggaagggtccgtggtggtgacggtgagcgccaaacgtgaggcgcagatcaatcaggatcatccggaacgcgacgccaacaagccttggaagggaacgcgcgccattggcggatggcagttcgcggtgatgcgccctcggttggccgattatgtgctgtcgatgcctcgtggcgcgcagatcatgtatccgaaggacattgcccaagtgattcagcttggcgacattcgttccggcatgaacgtgttggaatccggtgccggatccggcgccatgagcgtcaacctgctggacgcggtgggggagcgtggaagactgaccaccatcgagatgcgttcggaattcgcccgcgtggccgaagcgaatgccacggtctatttcggtgggcgccccgcttggtgggatctgaaaatcggtgatttcgattcggtcgccgccacattgccggagcattccttcgaccgcatcatgcttgacatgcttgacccctggaaccgtcttgagcaggcataccgagtgattgcgcccggcggtgtgctcgtggcgtatgtgaccactactacgcagctaagccgtatggcggaggcgttgagggaggctggctgctggacggaaccggatatccaggagactctggaacgcgactggaaggttcagggattggcgatacgtcccgaccatcagatgatcggacacaccggcttccttatggtttcgcgggctatggcgccgggatttcaggcgttgcgcaagcgtgaccgtgccacgaaagacacgaccaccgatattgattcgctgagcgccgaagaacgtgccgaacagctcgaagatcttgagttgcgggatatttccgatcgcaagttgcgtaaggtgctgcgtgatctcgacgcgcaggtcgaggctatcggcgattgatacggtgtttcttgccgttgttctgagacaatagtcatagcgcgttgcgttggtacatacgctggatcgttaaggattggagcattcgtccatgggaacgagcctcaagaaggttgcgaaaaaagccaaggattacaagtatgtgttgctggtgatgcgtcacgccaaaaccgagccgtttggtgacggtggcgacgccgggcgtgagctgaccgacaaggggcgtaagcaggcgaaagccgtcgccaaaggcctggccgcgcacaagatggtgccgacgcgcattgcgtgctccagcgccaccagggccaggcagacctgcgatcgcatgcttaaggtgttcggcgacgacccgaaggtcgactatcgtcagagtctgtacgaaggtggggtgcagtcggtatttgacgagcttgcccagaccaaggagaagcatcgcgagctgttggtactcggccatgagcccactgtgtcgatcgcatgccaatggctggcgagctccgaatcggatgcaatgctgctcgacatgctgaatctgggcatgtcgccggcatcgctcgccgtgttcggatcaaatgagccattcaaccaatggcagctgcacagtggcgaactcatcgcattgctgacggccaaggattttgaatgattccttcgcctctcggcatgatgctgagaggcgtgaaatgttgccatgccaactgatataaatcgtgcttatagcgacacttaaattttcttgatgagttatagctggcgatttcgtggtagcttgagcgggttgcattgttcatatcagatggaggattcatgtccgttctcacttccgtctccggtttccctcgcatcggccagaaccgcgagctgaagaagattatcgaagcttattggaagggtgtcgcaacgctcgacgacgtgcgcgccaccgccaaggagctgcgcgccaagcattggaagctgcagcaggaagccggaatcgatttgattccgagcaacgacttcagctattacgaccaaatgctcgacactgccatcctgctgaacgtcattccgcagcgctaccagcgcctcgccttcgacaatcccgaagagacgctgttcgccatgggccgcggctaccaaggagacaaaggcgacgtcaccgcgctgccgatgaagaagtggttcaccaccaactaccactatctggtgccggaagtcgacgaagccaccgacatcaagctcaacagcaccaagccgttcgacgaattcaacgaggcgaaggcgctcggcatcaccaccaagccggtgctcatcggcccgtacaccttcctcaagctcgcccgcaatccgcaggccgaagaactcgaatacgacaagggcctggtcaacgcggtcgccgccgtctacgccgaggtcgtggccaagttcgccgagctgggcgccgaatggatccagatcgacgaaccgtacctcgtgctcgacaaggagccgggcgacgtcgaactgttcaagagcctgtacaccaagatcctgcccgcacgcgacggcaagatcaaggtgctgctcaacacctacttcggccacatcgccgacgtgtatgagacagtcaacctgctcgccttcgacggcatcggactcgacctcaacgaaggcaaggacgagaatctcgccgccgttgaaaagttcggcgtcgcagagagcaccaccatcttcgccggtgtggtcaacggccgcaacatctggcgtaacgattacgccgtcagccttggactcgtcgacgcgctgaagaaggtcaccgacaacgtggccgtctccaccgcaagctccctgctgcatgtgccgttcagcaccgaaggtgaagacggtctcgccgatgatgtgcgcaagcatttcgccttcgccgttgaaaagctcggcgaactgcacgacctcgcggttctcgccgacgccagcgaggaagacaagaaggcatccggggcattggcagccaaccaggcgctcttcgacggcacccgcgtcgccgccgacaagaacgtggcggaacgtctcgcagccctgaccgactcggacttcgtgcgccagccggcacgtgccgaacgtcagaaggcacagcgggaggcgttgaacctgccattgctgccgaccaccaccatcggatccttcccgcaaaccaaggaagtgcgcgccgaacgcgccagactgcgcaagggcgaaatcaccaagactgaatacgacgaatacatgaaggcgcagatcgacgcctgcatcaagcatcaggagcagatcggccttgacgtgctcgtgcacggcgaattcgagcgtaacgatatggtcgaatacttcggccagaacctcaacggtttcctgttcaccaagaacgcttgggtgcagtcctacggtacccgttgtgtgaagcctccgatcgtatggggcgacgtgtcccgcgccaacccgatcaccgtggaatggagcgcctacgcacagtcccgtaccagccatgtgatgaagggcatgctcaccggcccggtcactattctcaactggtcctggccacgcgaggacatcacccacgagcagcagacccagcagctggccctcgccatccgcgacgaagtgctcgacctcgaagccgcaggcatcaaggtcatccagatcgacgaggccgccctgcgtgaaaagctgccgctcaggaagaccgactggcacaagaagtacctcgactgggccattccggcattccgactggtgcactccgcggtcaagccgaccacgcagatccacacccacatgtgctactcggagttcaacgacatcatcaccgacatcgacgccatggacgccgacgtgatctccttcgaagcctcccgcggcgatctcgtggtgctcgacgccattcacgacgccaacttcgaaaccgaagctggcccgggcgtctacgatatccactcgccgcgcatcccgtccgaagccgaaatcgaggaacgcatctacgaaatcctcaagaagatggacgtcgaaaaggtgtggatcaaccccgactgcggtttgaagacccgcggcaacgccgaaacctggccaagcctcgaaaacctcgtggccgcagcccaggctgtgcgtgccaagctgaccaaataaggcgaaacgttaggaacaagacgacagccatgcattcgccaatgttctcgctcgaggtgttccctccgaagcgaacctcccctgtaggcaccatctacgacacgttggatggcctgcaggggttggaccccgatttcatttccgtcacctacggcaccggcaaatcatccgaccgtacattgaccgcgcgcatcgcccacacggtaagcgaatacggcatccccagcgtggcccatctgaccgcgcagtatctgaacaaggatgacgtcgaccaggcactcgacatgttcgaacaggccaaggtctccggcgtgctcgccttgcgtggcgaccgcatcgacggtgccgaaccggcaggagtattcgaacatgccagcgatctggccgtatacatccgccagcaacgtccggacatgaaaatctacggcgcctgctacccggaaaagcacccacagtcggcaacgctggaagaggacatcgacaatctcaaaaagaaagtcgatgccggcgtgacgcatctgatctcacaactgttctacgacaacgaggacttcctgagattcctcgacaaagcgagggctgcgggaatcgacgtgccgatcgaagcgggcatcatgccggtcatgaacgcgaaatcggtgctgaacatgtcgaacaaatgccagtcgaaagttcctgaaaaactcggcatcatgctcgataaatggggaggtgacaaggctctgctcaaagaagcgggcatcgcctacgcatccgagcagatctgcgaactggtggcgcggggcgtcgacggcgtgcacctgtacacgatgaaccatccatgtgtcagccgacgcatttggtccaacgtcaaaccattcttcgtctgatttcaggcgatgcaacaaacatcaagggtggttgcgggtatttcgcaaccgcccttggttttatcagcggttactatagaaaccatgacttccatgcaacacaagttcggggcgcttgatctgattcgagcagggctgcaagatctcgacagggctcgcacgttgttcgacgagctgcacaatgacggcatcgatgacgacaggatgcggctgctactagccacgctggaaaaagcgtgcgatcccgacatcgcactcagcaacctggtggacatcatcaaagtgatgcaaagtcaaggcaaggatttcaccaacatcatcgccgatgaaaactctttcgtgcgactgatcaccgtgctcggcgtatccgatgaaatgggcaagctcatgcgattccgcccggaacttgtggaggccgcagccaacgatgcctgcgaaagccacctttacaatcacgaacagcgcagagcgcatgtgctcaaatcggtaggagccgatcccaatgaccacaccatgccgaccgcaagcctgccacttgccgaagctgcgacggcgctacgtaaaacctatcgcaaacaactcgccgcaatcatggcgcaagacgccacggcgaacgatcccatcgaaatccaaccgcgcatcagcaccgaactttccgaccttgcggacgcggcgcttgaaggcgcgctcgccatcgcacgccatgaagtggacggcagcgaacatgtgcgtttcgccatcatcggcatgggcaaactgggcgcacaggagctcaactatgtatccgacgtggacctgatctacgtggtggaacccgccgacatggacaccaacggcatggcactcagccgaatcggcaccaaaatagccaccacgctgcagcgtgtatgccaatccgtcatcatgggcgtcgcagaaccgacactctggcagatcgacggtggactacgccccgaaggcaaggacggtccgctggtacgcagactcgaatcccacgaagcctattacgagcaatgggcggaaaactgggaattccaggccctgctcaaagcccgcccggtagccggcgacaccgacctcggacaagcgtatatggatatgacccgactgttcgtttggacagcttccaagcgagacaacttcgtctatgactgccagcagatgcgcaaacgtgtcgaagaccttattcccaacccgctgaaagaccgcgaaatcaaactcggcaggggaggcttgcgcgacgtcgaattcaccgtgcagatgctccaactcgtgcacggccgctccgacgaagcattgcgtaccagctccacactcgaatccctgcaggccttggccgaaggcgggtacgtctcacgcaaacaagccaagaaactttcatgggactaccgattcgaacgtgtgatggaacaccgccagcaaatgtgggcgctcaaacgcacccacctgttcccagacctcggcaaagccaacgctggcggtcttgaacgcaaacgagacatcaccatcgacgagctgaaccaaaatcccgaactacgtcgactcgcgcgcgcatttcacatgcatcccgaagaactcgtcaacaaatacgatgagacacgtcgtgaggtgcgtcacctgcacatggacatctattaccggcccatgctgcccatcaacgcgggactcgacgacgaacaggtggaactctccacgaaagccacgcaggaacgattcgaatccatcggattcgccgatgccgacgcggccatgcggcacgtcaccgcgctcaccgcaggcatctcccgtgcggcaaaaatcaaccgcatcctgctccccgcagtactgcaatggctcggcgaagggcagaatcccgacatgggactgcttaactggcgcaaacttgaagaaaacttcggctccgaaagcggatacctcggattcctacgcgattcaccatccgcggcacaacgcctatgccacgtactatccaactcacgattcctcggcgacgcactcaacaaatccgtcgaatcagtcacatggctcggcaacgacgactctttgcaaccacgttcgcgagaaagcctcgacattcaaaccaaggcgacgcttgaacgcaatgccggcaacatcaacgatttcgccaactccatccgagccatgcgcagacacgaaatcgaacgcatcggtctcgcttggatgagtggcgtgatcgacgatgaagcatcgctcgccggcatgaccgacgtatacgacgcggccatcgaagcatcgctgcagtgggccatccagcatcgcatcaacgacatacagatcgacgaagctccggcggcgatcgccatcatcggcatgggacggtacggcggtagggaagtgaacttcagctctgatgctgacgtgatcatcatctacaggccggccgaaggtgccgatgacgaccaagccaaccttttcgcacgaaaagtgcaggaagacctacgtgcgatcctgcaaggtccaaccacattcgaaccaaaaatcgaacttgacatggatcttaggcctgaaggcaaaaacggaccgctcgtacgttcctacgcatcctgcgaggaatactatcgatcctgggcaagcacatgggagcatcaggcgctattacgcgcacgatatgcggcaggcgacgcgtctcttgccgaggatttcctcatgaacatcgccgacccgttgcgttatccgaaaatcgatcttacggaaacgcagatcgccgaaatccgcaaactcaaggcacgtatggaagctgaacgtctgccgcgcggagtacgtagggatcgccatctgaagctcggcaagggcggactgtctgacgttgagtggacgatccagttgctgcaattgcagcatgcgggagacaatgccaacttgcgtgtcaacggtacgttgcaggcattgaacgagttggaacatcgcaagctgatttccgctggcgatgctgtggtgttgcgtaaggcatggcgtatgtgcacggccgcgcgcaacggcagttatctgtggagcggacgcgtcaatcaggctgatattttgccggacgattcatattcgctgggaggcatcgccgtgtatctcggttacgatgcgaatcgcggccaacatttcgaaaacgacctgctcgccgtgatacgcaaagcccgtgacgtaacggaacgcctgttctacggtcgttcgtgagtcgtgccatttgaacggctaggagcatggtgtggccgtcggaccgaagttatacggctctgacggttatgctgattcagggtttcgtgcatggaaggatggaggttgcgccacgaatacttgtgaacacgcggtgaactggcagggtctgcatttcaggctatagttggctaggtcacttcgagtggccaccttcaaccacaagttgcatgaaaggtgagccgttgtcttcagtactcgaacaggcggttgaaacgccgatggtcgggaaaagcgtcatcacattggatgatctttccattcgccagattcaggaattactccacaaggcgcagtacattgattctcatcgtaaagaagtggcgcacacctgcgacggcagggtgctcgccactttattttatgagcccagcacccgtacgcgtctgagctttgaaaccgccatgctccgactcggcggcaaggtgatcggcttcgccggcgcccagctcgcttccgtgaccaagggcgaaaccatttcggacaccctgaaaaccgtgtccaactacgtggacgtggtggcgatccgccacccgaaggaaggcgccgcgctcgtggcgtcccgtgcagcctccgtgccggtcatcaacgccggcgatggtggacatatgcaccccacgcagactctggccgatcttgcgacgatgcagtcgcgcttcggtcgcgtgaacaatctgactgtcggactgtgcggcgatctgactttcgggcgcaccgtgcattccctgatcgaaaccctgtgccgtttcggcaacgtgaacttcgtgctgatcagcccggatgagctcaagaccccgcagtatgtgctcgaccgcatcaacgccaccgactcctgctcctacacggaagtcaaggatctcgtttccgtgatcggcgatctcgacgtgctgtacatgacccgagtgcagaaggaacgcttcttcaacgaagacgactatctgcgactgcgcgacacctacattctcgacgaagccaagatggcttacgccaagaaagacatggccgtgctgcacccgctgccgcgagtcaacgaaatcgccgtcgaagtggatgacgacccgcgcgctgcctacttcgaacaggtcaagaacggcatgcttatgcgcatggcattggaaagctcggtggtcggagacgaactgccgggatatgaaccgcttgaatccaaggaggttgcagcctgatggaagtcaccagcattcagaacggcatcatcatcgaccatgtgcctgccggcaccgcgctcaaggtgctcgaatacctgaaaattgatccggctaagaccaagctcgcgctgatcatgaacaccgacagctacatgttcggcaccaaagacatcatcaaaatcgaaagcgaagaggaagccgaaaccatcgaccttgacgtgctcggccttgtggcacgcaccgcaaccgtcggcattgtgcgcggcggtaaaatcgtagagaaaaagcagcctacactgccggaacatgtggtcaatatcatcaaatgcgtgaacccgcgctgcgtgactaccaccgagccggccgtacagatgttccacctggtgcattccgaccgtcaggaataccgctgcgactactgtgacgaggaagcgaagttctgacccatgaccctcacccttcacgacatcaaggtttggaacaccggcgaagtcatcgacctgatcgtcccatctgacgctgatgaaacggtggacgcttcggccatgaccatcgccccgggattcgaagatccccacgtccacttccgcgatccgggccagacctacaaggaatccatggtttccggttgcgcggctgccgcctctggcgggtatacgaacgtgctcatcatgccgaacaccgttcccgccatggatggcgtgaaggtgacggcgggggaaccgggcgccagtgaagtgctcgacgccggtttcgacacggtcatcgactatttgcagcattacgaacaagcccatgatgtgaccttgccggtgcgttatgacctgtgcgtatgcgcttccaaagggcgtgcaggcaaggaagcaaccgacgtggccgactggatcggctacctgcctgaacacgatgacgacaacaaggacgcctaccagctgtgccacccggtgaccgccatcagcgatgacggttccgcggtaacaccggaaatcctcgaccaagtgttcgacaacgtcaagaaatcaggcttatacctgatcgagcattgcgaacaccacgacaccggggcggtcaatgaaggtcccgtatcacgagaactgggcgtacccggcattcccgaagataccgaactgaaaatcgtcgaacgcgatatcgagatggcgcgcaaaaccggcgtgcatgtgcacttccagcatgtcagcactgcgatttctttcgacgcgattcgcaaggccaaagctgaaggcttaccgatcacgtgcgaaactgcaccgcactacgttgcgttgtgcgatgaaacattgctgaaatacggcactctcgccaagatgaatccgccgttgcgctccgaagaggatcgcaaggcaaccatcgcagccgtagctgacggcaccgtcgatctgctggccaccgaccatgcaccgcataccatggaagagaaggaccttggtttcctcgatgctccgaacggcatcattggtcttgaatgcgcgtatggcgtatgccacaagattcttgtggacggcggctttatctccgacgaacgcctgattgaactcatgtcgactgcgccagccgaacttatgggccacagcaaggccgacgtcacagcgttgcttgacgaatacgcagacgccgtccccggagacgacgacaccaaacgcgtgctggacctcgtcaaggttcctgcagaagaccgcgcggatctggtagtgctcaacaccgacgaggcatggaccgtgaatcctgaacgattccattcctcggctcgtaacaccccgtttggtggatggcaggtcaccggccgtccgctcgccaccatcatcggctcgaaactagtcttcagccgtatcaacaaggaggattgatggatcgcctgatcgaagcaatcgcagccaagcagaatccgagcgttgtgggacttgacccgaccgaagcgctcgtgccagcgcaaatcgtggccggctttgccgaggaaatcagcgaacaggttgaagatccggcggaagcgccgtccatgcagctttccgtggccttcttcgaattcaaccgcgccatcatcgacgccgtcgcagacatcgtgcctgcggtcaaaccgcagatcgccatgtatgagacgctcggtccggcaggcatcgacgcctacaccatgacctgcgaatacgccaagcagcagggcctgtacgtgctcggcgacgtcaagcgcggagacatcggctctaccgcggctgcatatgctcatcacctcagcggtataggattggacgacaccgcctatgatccatggcatgaggatgcggtgaccgtgaacccatacctcggcaccgatggcatcacaccgttcgtcgacgccgccaccgccaacgacaaagacattttcgtgcttgtacgcacctccaatccgtctagcagtgaactgcaggaactcgaactcgcctccggtgaacgcgtatacgagcatgtcgccgatctggtggaaggctggggcgccgaaaccatcggcaagaacggctattcacgtgtaggcgcagtggtcggagccacgcacccagaggaaggcaaggcattgcgcgcacgcatgctgcacacgttcttccttgtaccgggatacggcgctcaaggcggcaccgcgcaaggcgtggccggcatgttcgaccgtgacggcatgggtgcgcttgtcaactcgtcacgtggcgttatcggtgcatggaaaaagtccggcaagtattctgaatccatgagcgccgacgatgctctggatctggttgcggaatcagcccgtgaggcagccaaagatatgcgtgacaatctgcgtgcggtcttgccgtaacctgccgactggccaactgttcaatctgaaagaaaaacaaccaccaaaccatcgaacgtaacagagagggagttcatgaccaccgcaacaacgttcgttccgaccgttgccgaagcgactgcggcaggctttttcccgagccggcatgaagtcgaggtcgttgacaatcaggaactgactgacggcgtgtaccgtttgacgttccgtgacgaatacatcgccagccatgcaaagccggcacaattcgttgacgtatattccaacgatccaagcaagctgatgccgcgtccgttcggcgtttgcgaaaccaacggcgacgaagtcagcctcatgttcgccgtggtaggcaagggcaccgcagaatttgccggattgaaagctggggacaccattcgtgtgatgggcccgctcggcaattcgttcaagaccaaggagcccgccaattatgtgctcgtggcaggaggtcttggcgtgcctccgctcgtgcatgcggcacagcatatcgccggcatcgaaggcgcggtcagcaccgcggtgttcggctaccgcaacgtgcgtttcggcgacgaatatgcgggcaagtatgccgacaaggtgtacagcatcgacgagagcgaaggcaacgtgatcaccttgcttgaccgcatcgaaggcgagttgatggattcgggactcaagccggtgattctgacctgcggtcctctgccgatgatgaaggccgtcgccgcatgggccgtgaagcgtgacatggcgtgccagctgagcttggaacagcgcatgggctgtggctatggcacttgcgtgctgtgtacggtcgacacgttggacggacgtttgaaggtctgctccgatggtccggtctttactcgcgaacgtttgggatggggtgaatgagatgatcgacgatacccagcatgagaacctgtacggttcgtacgagtggaagcatcccacgcaggtggcgggcgtgccgtggaagaatccggtcgccacggcttccggcaccttccagtatgcggcggtccgctggttctacgacgtgagccaactgggcgcggtcaccaccaagggcgtctccccggtgccatgggaaggcaatcccggcattcgtaccgctgaaggcccatccagcaacatcaacgcggtcggcctgcagaacccgggtgtggaccattatttggaagacgacctgcccaagctcaaggccatcaacgccacggtcatcgccaatgtggccggtcactgcgacgacgactatgtcgaagtcgtgtccaagctgaacgattcttcggcagacatgctggaaatcaacgtgagctgcccgaacgtgtccgccggaggtatgagcgtcggcactgatccggtggcgttgagccgtctgatcacccgcctgcgcaagctcaccgacaagaagatgattgtcaagctcacgccgaacgtcaccgacatcaccgtgcctgcccgcgcggccgtggaaagcggcgccgacgcgctgagcatgatcaacacactgctcggcatgcgcatcaacattcgcactggagaaccgatcatcgaccatgtgaccggcggcgtttccggaccggccgtgctgccgatgggactcgtggccgtgtggaagacccgctccgcattaccgaacactccgatcatcggcatcggcggcatcgattccggtgagaaggcgcttgaatacctgtatgccggagcgaacgccgtggaagtcggtgcggccgcactgttcgaaccgaccgcgccattgcgtgtggcccgcgaactcgacgagctgctcgacgcacgtcccgaactcgcagacaagctcgccaagggcgaaacttggcgttgacctcgatcattcatcaaaggagcatgacatgactgaatccctcgaccaccgttttaccaagttcctgctggaagcgcaggcgctgaaattcggcgagttcacgctgaagtccggtcgtaagtcgccgtatttcatcaatgcgggcgcattcaacgacggacgtaagatcgccacgctcggcgcattctatgcggagaagatcgcggcggaaatcgaagcaggcaatctgccgaacgacatcgacaccattttcggtcctgcctacaagggcattccgctgggcgtctccaccgcgatcgctctgacttccggccacggtatggaagtcggctacaccttcgaccgcaaggagaagaaggatcatggcgacggcggcatgatggtcggcacccagctgaccgacggcatgaaggtactgctcgtcgacgacgtgatgaccgcaggcaccgcagtacgcgaggtcattcccaagctcaaggccgaagcggatgtggaggtcgtcggcttggtgctttccgtggatcgtatggaaaagaccaaggattccgacacgtccgcggtgaaggccgtcgaagcagagttcggcttcccggtattcgccattgccaacgtgcgcgagatcttcgaggccggccagcatatcgaaaccgctgacggcaccgcgtatgtgaccgacgagatcaaggccgctgccgacgcttatctggagcagtatggtgcctgaattctataggcgggtcctatagttgacatatgaaaagtgcctcacaccaatcgaaagcatcggtgcgaggcacttttcaatctcatatcagagtgcattcagtcgatcaggttgtatccatggtcggccaccaccgacttgagcttctccaaatagttttccgcggccttcgacagcttcgcacgctcattcgtgatccagccgaccagcatggtctcatcggtgtcaagcggcacggtcacgattttctcattgttgagatcgccgttgtcgatgccggtgcacacggtgtagccgttcagaccgatgatgaagttcagaatcgtcgcacggtcggtcacgttgatctgcttgggggagtattccggccagaccgcctcttcggcgaagaagaagctgccctcctcgccctgctcgtactggatgaacgggaacggcttcaagtcgtccatcgtgactttcttcttgccggccagtggattgttgcgtgaaatgaacacatgcaacggagcacggaacagtggatggaattccaaatgcttttcgcgcaacatcttgccaatcacgtctttgttgaaatcggacaggtagatgatgccgatttcggaaagcatgttcgccacttggttgatgatgtctttggtgcgcgtctcacgaatggtgaactcgtattcgtcggatttgatggagttgatcatttccacgaacgcttcgacggcgaacatgtaatgctgtgtggacacggaacacagctgcttgcgtggcttcgcgttcttgtaacgttcttcgagcagcgacgcctgatcgagcacctggcgcgcgtaggtgaggaattccgctccgtccacggtcaaggcgatgccttgcgacgagcgggtgaagatctcgatgccaagctcattctcgagttccttcacagacgagctcaacgcgggctgtgacacgtacagctcgtgcgaggcttcgttcatggaaccgcattccacgattttcacaatatatttcagctgaagaagagtcataaattcaggttagagccatgtactgaccgtgggggagtgcttataccctcttgtctggatagtggactgccgatcgcgcagatcaaggacgtgaaaaaccaattgcagcttgacgaggatcgcacacagttggaaaccccacaaaccgtgctcgacaaaaccggtcaggtgttcgcccaatgggagcggaccggcttgacgggtcaggcccacaagcaaaagagttgtccctatcggagtgctccatatcggcataagcgacaaaaagggattgcccggctttctacacaccagacaatcccgttcgtcacaacctactacagttcggtctactggtacagatggccgccctgctcgcggaagcgctcgctcatctcttgcatgccggcagcgatggtttgcgcgtcggcgacgagcttctcctgtgcttcggcattaccgaattttttgcggatgttttggctgatggccatggagcagaacttcggaccgcacatcgaacagaaatgcgccatcttcgcaggctcggccggcaaagtatcatcatggaacgcgatggcggtgtccggatcgtagctcaggttgaactggtcaagccaacggaattcgaaacgtgccttgctcatggcattgtcgcggtcgatagcatgcggatgatgcttggcgatatcagccgcatggcaggcgatcttgtatgcgatcacaccttgcttcacatcgtccttattcggcagcccaagatgttccttcggcgtcacataacacagcatggcagtgccatagcgggcgatttccacaccgccgatcgccgacgtgatgtggtcgtagccgggagcggtgtcggtggtgagcggtccaagcgtatagaacggcgcgtccttgcagatcgccttttccatctcgatgttcatgcgcacggtgtcgaacggaatatggccgggtccttcgatcatcacctgcacgtcgtgttcccatgcgcgctgcgtaagctcgcccaaagtcatcagttcggcgaactgtgccgcatcgttcgcatcggcaagcgatcccggacgaagtccatcacccagtgagaatgcgacatcgtacttggcgaagatctcacacaactcatcgaaatgcgtatacaggaagctttcctgatgatgctgcaaacaccattcggccatgatcgaaccgccacgcgaaacgatgcccgtcatacgattcgccgtcaacggcacgaaacgcagcagcacaccggcgtgaatcgtcatgtaatccacgccttgctcgcactgttcgatcactgtgtcgcggaacagttcccagctgagcttggacgcatcatcctccaccttttcgagcgcctgatacattggcacggtgccgatcggcacgggggagttgcgcagaatccattcacgagtggtgtgaatgtcgttgccggtagacagatccatcacagtgtcggcaccccacttggtggcccacgtgagcttctccacctcctcgtcaatagacgaagtgaccgccgaattgctcatattggcgttgagcttggtgaggaacttcgagccgatgatcatgggttcagcttcgggatggttgatattgcaaggcatgaccgcacgccctgcggccagttcgctgcgtaccaattccacgctgcaatgctcgcgctccgccacatagcgcatttccggcgtgatgatgttgtggcgcgcgtaccacatttgcgtcaccggatgatccttggccttcatcggcttatgctggcgaccacgccattccttggaagccttgccacgtttgatggcgcgtttgccgtcatcttccaaattgcggcgacgtccttcatattcttcgacgtctccacggtcaagaatccagtccaaacgtaggggagcgagaccctccttcggatcgcatttcggaccttcggtgttgtaatccttgaatggtgcgttcggtccgacgccaggagtgtcagacagtttgatttcagtgtacggcacttgcagatcgtaggaaccgaattcgttttcgaaatgcaccggcgtggttttgcgaatatgtgctttgtctcgctgcttggaatcgcgtgcggcaatgtcgacgcgctgttgcttggcaagcttggaggcggccttggcttccttcgcattggtgaacttcttttcgccggatgcgccgtcggctgtgttgtcagtgttgatttccgctgttttctgggctttcacgcgcggcgcgtacccgtgcttcgtgtcgccacgtacggctttccagcgcgctaccatattgcgggttgcagcttccggatcatcggctcctgcaatcgtggacaccacgaaccagcctgccgcctttgaatgcgccagcatctccatatcatctgcggtcacgccaccgcctaccactaccggaaaaccactggctgaacaaatggtgttgatctgctcttcgtcaagcgtgcgaccggaaccgtcattgccgcctacggacgcttccggcttggtgacggaaacatgcagtggtgccgcaccgatatagtcgatgcagccgtcgggcaattcgttgatgagtttgaccaggctttccgtttcggcggacaagcccacgatggcatcttcgccaagcagtgcacgggcttcgcgcggttccatatcggtctgtccgatgtgcacgccgtcaaccttgatgcctttgctgcgggcctgccagaccacgtccacacggtcgtcgatcacgaatgccacggaatccgacttattgttgtcttcgatgatttgcgcgatatcacgcgccatgtcggtgagatccttcgcgtcagcgtctttgacgcgcagttggatgaagcttgcgcccccgcgcaatgcgtcatcgatgacgtcggtgatcggtcggcctttgcaatcctgtggtcctaccacaaaataggcgctcaggtcgaagctgtctcgcatcgacgcatacggataattgttcatgattcccccttgattatgctgttttgggttgggaaaacttgatttcgcaggcaatgggtatgctgacgcgcccgtatgctcggttatacgggatagaaaacggaattacgattgatgattgcgcgatgcagactgtttggtcgacgcgtctgctgcgcagacttttacggatgccaattgacgctggcaatgcgtgtgcgctacgacactcattcttcgctccctacgatggtgttaaccaacaggttcaaagggtcaggcattcgcctatctcagctccgttggggagcccccctgctttacgtgttggctatgaatctacgccctgcactggacgtaactttcatcgaagcccacaggagagttaggccagccgtcactttcgcatgcatcgcctccatccgcgtcacgcctccgccgcgcaactcacagcaaactctccttgcaggctaatctatacttcagttcaatgcattgcgtgtgaaagaggtcgactacatgttggaaacggaacggctgacattgagggcttgggcggaaacagatgcggaaagcttgtacgcctatgcgaaagatccggatatcgggcctatcgcgggctggcccgcacaccgatcgaaagaagaaagtctcaatacgattcgtcatgtgctcaatggcaaggaatgctacgcgatttgcgagcgcggcagcaataaccccattggttcgattgagttaaagcttaatggtcatacggatatgacggatcgtgatgatgagtgtgagttgggttactggctgggcaagcctttctgggggaggggttatatgccggaggcagccaaggaggttatccgtcatggttttgttgatcttggtatgagtgcgatttggtgcggctattatgacggcaatctgaagtcgaagcgggtgcaggagaaggttggttttgtctatcatcacacgtgtgatgaggtgccggtgcctcttatgcacgaggtgcgtgtcgggcacgtgaatgttcttaccaaatcacgctggcaaaatttagctgcctgctgattgtgctagaagctaacctagaatgctttggaagggtcttggtgggcttcgaacggatgctggtcaagaccctttagagcttcatgatgttttcctcgatgcgacggatgacgtcaatgaaagcttcatcgttgtgcccggttggatctggcagattccaattatcgtcgaaagccttgccgatatagggacatcccacgtcgcagcccatggagatcgcggtgtcaggttttggaatatccgaaatcagcttggagtattgcgttttctccatgtcgatgccgtaaagctctttcatgagtcgtacggcatcctgattgatctgcggtttggtttccacacctgcggaataaaaatcacaatcggttccgcgtagatgctttcccaacgcttcggcaatctggctgcggcatgaattatgcatgcaaataaaagccacttttctcatagctttccctgtctgcgatgttatgatttcacgattgctgtcccgtattatacgtttcgcccaatgctcggcgttcacatcatcgaataacacaatgcccggtacgaccatgtcataagctggtcgtaccgggcattggcttggattattcgccccagacttcttcggcgatggaccttacgagtgcgatcttggcccactgctgctcctcagtgagcttgttgccttcctcagtggaggcaaaaccgcactgggtggacaggcataagcggtcgagcggcacatgctgggccgcttcggagatgcgagccttaatcacttccggatcttcaagttccggtctcttggaggtgacgaggccaagcacaacctgcttatcgccggaaacctcagccagtggcgcgaagtcaccggaacggtcgtcgtcgaactccagatagtaggcgtccacgttctcttcgccgaacagcttggctgcgaccggagcataaccgccggacgacagccacgtggaatggaaattaccacggcagatatgggtgttgatcaccaaatcatcaggctggtctgcgatcgctgcgttgatcacgtcaagattctcctgctgcaggcgggccgcatcctcatcgctccagccgagacgctcacgcacgctcttgtcgcacaggcgagtccaagtgcagtcatcgaactgcacgttacggcagccggcggcatacaggtcggcaatgacctgacggtatgcggccacgatatccgcggtcagctcgtcgtcatctttgtagaactcgtcgtacgggtaggcgttcttgttgccggtaagcacgaaacgggtctgtgctggggaaggcatggtctggcgagcaacggtattgtcatcttcaaactgcctgacgaacttgaaatgctccacgaacggatgatcgtgtccgtcgagcttgccggtcaccgtggcagtgtcggcgggagtgacctcgtcatggaaggcaacgcgatgggcggctgcgacatggtccacgccgttgaagccccacatgaaatcgaaatgccaccagccgcgacggaattcaccatcggtgatgacatgcagaccggcggccttctgcttggcaaccagatcagtgatcagcctgtcttcgacagctttcaatccagcggcatcaataatacctgcagcataatctgcacgagcctgcttgagttcgtccggacgcagataagaaccgaccacatcggcgcggaacggcgcattcttggaatatgtcatgattctccttcgactattgacttgcaattaacaatcacaacgacaaaaccaacaatatgctatcccaccacccacgaacgaggcacattccatccgcctggttgacaacgtacttccgtccatccgcagagttttcaatgctggaataaatgggggtaaatgacactgcatggcgttccgatattggcagacgcgcggccgatgattgtgcaaagaatcgcgaaaggcatgcggaatcacgacatgagttgcgttgtgttcgtatataatcgcaacggacatgaacgactgcaaggaggctgccatgactgtgccgcaacgagtgcttgacactatgaattccggactgatctacacctgcgatgacgaagagatgatcaaagcacagaaggaacagatggaactgctatacgacttcaatgcaacccgccccagtcaaatgacgcaacgcaacgaaatcgcacgccaactgcttggcgaattcggcgaggacgcttatatcgaaccgccgttacatgccaattggggatgcaacacgtatttcagtgcgcacgcttacgccaatttcaaccttacgttagttgatgatggtgaagtgcatatcggcgaacataccatgatcggcccgaactgcactatcattaccaccggccatccgattcgtcctgacctgcgcgagaaggtcacacagtattctctgccggtcaccatcggccgtaatgtgtggttgggcgccaacgttaccgtgcttcccggcgtcaccattggcgacaattcggtgattggcgcatgctcgctggttaccaaagatattcccgccaatatggtcgcattcggacagccatgcaaggtgtatcgcgaaatcggcgaacatgatgacgtctactattggcgtgaccgcatgatcaacccaccctatgaccagaagcagtaaaacaaatcactatcgaccaaccgttcaaacaggtcgaatcatcgtggactagtcgttatgacagatccacgatcccataatttgcgactgtcaagcgaaataccgggcgcaccattgctccaccacacgggcaaggtgcgccttctttgaaaactcagtcctggttgctccaatcaatcatgcttcccaccataacgtgcgaaacgtaacgcacgcatgtccgcggtagatatttagataattatctaaataagaaaatgtgtgaacattgcgaagtgaaggaggaatgtatggcaggggagggattcaaagcgctctccgatcccacgcgacggcgcattttggaattgctgcgcgaacgtgacatgacggctggtgaacttgcggaacaattcaacatgagcaaaccgtcgatcagccaccatctgaccacgttgaaaaccgcgggactggtaaccgacgaacggcacgggcagaacatcatctacagtctcaacaccacggtgatgcaggatctgatcggatggttcatgggattcatggacggcgatggaaacgtcaatcaagcgaatgatcaaacagacaataaataaaggagggtcttatgcgcgggaacaacttgaacgatttaaaaaacaacatcaacaatgccgaagacaagaacaagactgattcgggggagaagatcgctccgatcggacgcaatctgtgcattgcgcttgttgtactgtgtgtagtcaacatcatcgcacatcttgcctgctatagtcggcttcccgaaaacgtgccgattcattggggtgccgatggttcggtcaatggttatggcccgcgtgccgtaacgttgattcttgatgtattgccgttgctgtgcttgggacttttcctcgtcatcccgaagatggaccccaagggagaaaactacatgaaggccagcggactgtatcgtggattcgtcatcgcgttcacactcatcatgtgcggtgtcacatggttcactgaagccaccgcattcggtgtaatcccagctaccggcggtcccgttgggcttattgtcagcgtggtattgggcgcgctgttcgtcggcttaggcaattaccttccgcgcatgcgccagaattacactttcggcatcagaacgccttgggctctggtcgacgagaacaattggaagcgtacgcagcgtgtgggtggcatctctttcatggtgttgggagtgctgttgattgtggcgggtgttgtcagctctgttgtgcctgtgggcgacatgctcatggtcgcaattattgtgacgatagcggttggtgcagcgctcgttccttatgtatacagctacctgttgttccgccgcagtcgcggttcgcggcaaaactgaagtaacgtcatagcgacgctagataccgtcgccttgacacagaacacaaatcaacgttgacaaacgccgttggcaatctgggaaagtttaatgaacggactcaggagaaccaattgcaaacagtgaaggaatcgaatctgaatttcttcagtccaacaatcggggtgcggttcacatgcgtgcgatccgcaccctttgttaattcaagtgttcgttttgaaaaagtcagaaatccatgcccaaagatttcagatcgcggcgagcctgaccggcgttagtgaagcggaacgcgtgcatgcccacggcctgtgcgccagtgacgttcttcgcggtgtcgtcgaagaacacgctggattccggcctgagattgaaacggctcagcgccagttcgtagatgtcggcattcggcttgtgcatcttctctacgccggacaccaccgtgccctgcagcagctcgccgagctgcgggaaacgttcgaatgcgaaatggaacgtctcatgcgaccaattcgtcaacccccacacgccgtagcctgcagccttcaaatcacgaagcagctgttccatatccggaatcatgcgggggagcgcatcgccgtaacgttcgatgtaatcgcggaaaatctcggcgatctcttcgccctgttcacgtaccacgtcgggataaatggcttcgaaatcctcgccatggtccatgcgatcctcataatcgtagaagccgcacggatcattatccgcgcaaatacggtctacaaccacttgggggtacctgccttcaaggcatgcgcgcgtctgccagtcgataagcacgccgcaaaaatcaaagaccacatcggtgacgttggcactgggggaggtcatgaaaatccttcctgcaaaatacggattggcaacgctagtgtagcgcaaagccaccgatgttggggctggtgttcggtaaatttgttttgcaattaaagtaattgcaaaaatgccggctgaatgccgccgataatatcgctcgcgatgatcggatggccgatttccccgaaatgctgctttttggaatgcccatagatctgcggacgatgccatccacgctgttcggatcgcgatgcgatcgcgcccgcaagaccatgtatgtaggctccggccgccacgacttcgggaactaatgccggatcctcggcaagcatgtcgtcctgttgcgcgagcagggcgcccaacatgccggcaagcacatcgcccgatcctgcggtggacatccacgccggcgcgcgtccggaaagaatcacccgctcgttgccttcgccgtccgtgccgaccaccatggtcaccgcgcccttcaacaatacggtcgcgccggtcagctcatggaccctgcgggcgcaggcgagcggctgcgagcgcactttgtcgacgctggcttcgtttccgtctagccgagtcaacatgcgggccagctccccgacgtgcggggtgacaaccacttgagccggcactttgcctggcagcaggtccaaagctccggcgtctaccacgatcggcggcatgcccagggcgctttcattcctggcgtcgtcattggagccggttttttcctgcagtgcgtaatgcttcaacaacgcggttatggtttcgcgttgaatgtcggtgtcggcggcttcgtcgccacccgtgggaacgccggaaccaaccacccatgattggacgcggcccttgccgatcaccgcctcgggcaacgaggaaagcaccatgtcctgcgctcgttgcgggccgagatagcgcaccatgccagtgttggcgcgcgccgccgccgtggccgacaatacggctgcaccggggtaacgggcggagccggtcaccaagccgaccactccacgcgaatacttgccgtccgaaagttgcggaaggcgaatcgaatccgttacgaaatcgccgtccgtcatttcggccgcggggacgcaatcatcaatgtcgaaaccgaaatcgaccaaagtgaggcggccgcatgcgtatgaggcgggtggcaccatcgcgcacggcttcatcgcgccgaatgttaccgtaacatcagcaggaatgtacggtcctggaagcgaaccgtcatttacgccaacgccggacggcgtgtcgatcgccacgacgagcggcagggcggaggaaggctcgttgttcggcagggcgggcctgtcgggaagttcgccatcgaatcccaaggaggaagcgatggcgcctgcgatgccacgcaatgcgccgcttacgccgattccggtcatcgcgtcgatgatcacatgggagtcctgaacgtattcaacggcggcctgcagtcgttctccggcctctcccgcggaaaaacccgtggtgcatcctgggatttcggcggcgggatcaagtacgagaacacggcctccggcatgcacgaacgcgccgaacgcctcctcgtgcagggaacgtcccacggcgatcgcggtgacatgcgcgccttcgttcgccagttccgcgccggcgtatagaccgtcgccgccattatctcccgcccctacaaggagggctacccgcgcgtcctcgacggcgaggtcctcatcatcgagcagtgtcatggtcacatgggccgcagccgaggcggccatgcgcatcagcggcacgccgtcgtcaagcagcggacgttccatctcgcgcacggtatcggaatcgtaagcgctgtacagcagtgtttgcaaacggtcggcgtcgtcggcgatgtccataacgttcccttcctcgtcgtctatgagcaacaatccctactgtagtcgtaatattgggagtcaaggatttttcggcgtggaatggagaccaaaatggcatatatcgaaatgcagcatagttacaagcgttaccaaatgggttccaccaccatcaccgcgaacgatgatgtgagcttcggcatcgaaaaaggcgaactggccatcattctgggcgcgtcgggcgcgggcaagtcgacggtgctcaacattttgggtggcatggacacgaattcagaaggcagcgtggtcatcgacggacgcgacatttccaactattccccgaaacagctgacggcttatcgcaggacggacatcggtttcgtgttccagttctacaatcttgtggcgaatttgaccgcgaaggaaaacgtcgagctcgcctcgcagatcgtttccgatgctcaggatgccgtcaaagtgttggaagacgtcggtctcggcgatcgtgtcgacaattttcccgcgcagctttccggcggtgaacagcagcgtgtggccatcgcccgagctgtggcgaagaatccgaagatcctgctgtgcgacgagccgaccggcgcgttggactacaacaccggcaagcaggtcctgcagattctgcaggacatgagccgtaagaaaggcgccaccgtggtgatcgtgacccataattccgcgatcgcgccgatcgcggaccgtgtgatccgcatgcatgatggcaaggtcaccgccgtcgacgtcaacgagcatccgatggacatcgcggaactcgaatggtgatgtcgcgacacgctgtgcgacactcgatttgcgaagacaaaggatttgtgtaatatatgtgacttgtgcacggaagcaattccgtacaggaagcacattcctgcgtagctcagttggcagagcatccgactgttaatcggacggtcgctggttcaagcccagccgcaggagctcacctgaagccatcggcgtgtcgccggtggcttttctgttactcattccctgaagctgcttcatcagcgaatcgtcaagcagtgccgaaatatcagtatcaagaaagtcggctgcgcgcacgaggtcagccagggaccaagatacggatcctcgaatcttctttgagatcgcagcacgttgcacacccaatgcatccgctaaggcggtttgcgatttgccctgtgtcataagcatcattttaatgttccatgacaccgttccttcggcataagcaacggcggcgtcagcctcttctgcaatgggcataagtgcaactgttgtcatttatgactcctcaaaaaagtatttgtatctatataagacacgcctatcatatagcataatttgcgtttcttcaaatgaaacattaatatgtatcttataaagattcaagttactaaaggggaaacatgccgatgaaggagtggctggtagagaaaggtctttcttatcgcgatttcgctgcgatcatgggccagtcgccgtcatcgatttgtaagaaggtcaatggcaaaacagcttggcagcagcaggacttgctgttcctgcacgatcgctatgggctttcttctgatttcgtactgggcatcaccgttattccccattcggaggaggtgtctgtctgacaagaaaatgcccggtttcgatctggtacatcgaaaccgggcgtatgcaacacatccaatgtcggacgatccggtgtttggcgacagtgaatcgttcgcattgccttttagattatggaggctgcacaaatgtctagtgtaaccgaagtcgctgtgccgacttctgattttgatggtaacgcccccgtgaatggttcgcggtgcatggcgtctacattttccgaatccctgtattggcgacgttctgcccggcgctacgagctggcgggtcttgccgcttcgatgctggccgcgttgtcgtgcgtggtttttctggcgattctgcttgccgcgaggaatctgcttctgccgggattcgctttggtgccggtggcctgcggcctggcttgtgtgggttgctggtgcgaccgtaactcgcgcgatgcctgggatttcgctttctggtcccttcacgcggaggtgaggcaatgaccatgaccgttggcgcgcgttccctcgataacgaggagcgctcgaatttccgggactacatgtccctgttgtccctgtccgtggatgcgtcgatgaccgtgagggaggtcatggcggtcgcctatctgatcggccggcatgacgcgcttcgtgacgtgcggaacgcttcgtcgccggctcggacggtgaaccgtcgtctgatccatggcggtccgtcggattgcgtgttcaaccgcggctacgaggccggtgcgggcatggtgtccgacgagatcgacgcgttgatgcgcgacgtggaggccctcagcggcgatgacgcggtgttctcgatgctcaggcatccttcggtgagcgggggtgatgaatggtggaattggtgatcctgctgttcgtggtgctcgcagtggcctgtttcggcctgctgctgccgttcctgcgtctggcagtcggcatcgtgcttctcgcggtccgtctgctggcctccctcgcgcgatcaatgggggcgggccgatgatgcacctcatactcgtgatcgccgtcgtcatcattctcgccgcgtcctatctgctgacgttcgccctgtgccgcgcggccacgcgccgcgacatgcttgaggcccgttggcgtgaggagtcggccggttccgtgagtgaggagagccatgagagcgcatgaaacgcatgagcgtgccgcgcgtcatggcggcttcccggcccgtggttccgcttcgggcctgttggcggcctgcccgtcggacggcagccacgacttctacctgtcgatgatgctcgacgttcccgtgccgcgcgtgcccatgctgcgcgcacgtctgcaagactcccgccgagggggtgccgcatgagcgtgaacgcggtcgattgggcgctcaggttcgcgcccgtggacgccaggcacaacggtgccgctcgcgtgctgatgtgtctggcgaacgtggccgacgacgaggggcgcaacgcgcatccgacgcacaggaagctggccgcgtggtgcaagtgcagcgtgagcacggtcaaacgccacctgtcatggctggaagcgaacgggctgatccgtcgcggcgaccaacgccaggccgggcatttcagcgagtggcaccggcccgtcgtgtgggatctgtgcctggggaaccgtctggagctcgaccccgacttcttcgactcgaacgacatcgactcgacccgaggcggacggccttccacggaaaacagggcgaagggaaaccccggctcacatgtggaccgtggttatggcgacggggacacgggaaaaccccagctcacgggtgaaccacggttcacagctgtgaccccacccccagctcacctggtgagccacagtacgtccctagtacgtaataacccctctgcccctacggggcatctccccgcaagcggagagacctccccggacgatgacggaatccgcgaggacggttcatgggccgacgccgccggagccgaacccccaagcagcgaatccgccgaggccggttccgacgcggaggcggtgtgccgcacgatggcggacgggctgcgcgccatgccgccgatgccggtgcccgaaccgttggcccggcccggcaaacgcgaactcggacgccgcccgacggctgatcgcccgccacggcatgccactggtgctggccgtgaccgaatgggtgtcgctgccgccttccaagaccgacaagggcgacgcttccggcaaaccgtatgacggtttctggcgtcgcacgctcaccggcccccgctccctcgcacggcactgggaccaggtatgcctccagatggccgacgacccccacgggcgtcgcctgctcgccgaacacggcgtcatcgccgacaagggcgaaacggcgcagccgccgagcgcggaatccacgccgaaggtgccgaactacggcatccccgacaacctggaccggcgcgtgtggaaactgctcgacccttacgacttcgatgcgggcaatgacgggttcgaggcaccgcgcaccctgcgccggctgttgaagcgcgtccccgcgaacgacgcagaaggcgaacgcaatgccgtgctggaggcattgcgggcgggccgcgccttcctggacgcggaatccagggagaaggacgacggcttcgggcagcggaagccgtccgagaccgggccggcgtccgtccgtttcggcttcatcggcggccgtgggccgaaggaggtgccggcatgttcctgaaaggcgaatgcgcggatttccccgactcgtggtcggaccgcatgtgggggcccgacgacctgcccaaccagcgaacccaatacgagctgcgccgcgcggcggtgcggatctgcgaggcctgcccggtcagggccgaatgcctcgcgttcggcatcatggtccgggaccagtacggcatctacggcggactgccgttgagggcccgacgccaggtgctgaagaccgcgcaggaggccggattccggttcgaccccgacgacccgaccgccgaacggcggctcgcccggtacatccgcgcaaaccccgagatcgtggcggcggcacgcgaacgcgaatgcaaacgccgcaagaccgagcagcgcaacgcacgccagcaacgatggcgcgccaccacacgctcgaccggcaaggcgaaggccccgaccgccgccacacacaccccgcccttgcaggacaccctcttctgaagacaatccgatacagataaccggtccggccccataaggacgaaccattccggaaacccgtatacgcggcaaaccgtggaaccgtgcacccgtggacacgggaagccggaaacccgaatgaaaggaacaatcccaatgaccacgaacacgaaaacggtggccttcgtcaacctcaagggcggggtcggcaagaccaccagcgccatcggcaccgccgaagcactcgcccgactgggccataccgtgacggtgcgcgacgccgacccgtccggcgcggcgaccctgtgggcgcacaaggccctatcggccggccgcccactgcccttcggggtggaggtcgtcaaccggttcaccgtcgccgcgcccgccgaggaggaatgggtgctgatcgacacgcctcccttgcagaccgatctggtggaggcggcggtggacgcggccgacctcgtgctgctcgtcaccaccaccggccccatcgacctagaacgcatgctggagaccatccggcagatcaacaagccctcctcggtgctgctgacccagacccgctacggcacgcgcagcctcaggcacgccgaggagttcctggccgagaacggactggcccattgcagggagaccatcccgtacaaggaggccatgcgtctcgcatcagacgagggccggttcccgtccgcctcgggctacgggcttatcgccaaggaactcagcgacgcattcgccgcctgacacccgcagaaccggaaacccggaaacccgtgtccacgtaaacccgtggatacggggacacggaaaggaacaacatcatggagatcaacaagccgatgaccacgaggaacatgctggcatcgacgctcacggactacaagaaaccggtcaagctgcccaagatcacggtggagctcgaccccatgctcaagaaacggttcaaggccgaggccgtgcgacgcggcaccaccatccgcgacatgctcacggcatggatcgaacatgactgccctcccctcgacgcggcggacgcaagggccgaggcgaagcaagacggaagaaggagtggatgatgacggatgacatcgaggagcgggccgtgctggcccgtcgcgggatcatggatcattcggattgcgaggactgcgtggaggactggacgttcctgatgcgtcagggacggcgggagttcccgttgggattgcgcacggtgctcgcgtgcctcgcgttcgccgaacgcgagggcgcggtgcccgagctgccggcggattggtgggttaatatcaacaggaggtatcgatgacgacgatgcgcggcgaggggagctggctatggatgtgttcaaggcatggccgggaagggcggaaagcatcgtgatcagccaggagtcatacatggggtgcaccggcggcgtggccccgtggcgtcgtgacggcgacacggggccgtcctactacgcggtgtgcccgctgtgcgacaatcccatccagatcgtcggcctgttccgccggcaggaggaaagccgtgcgcgccggccctacgggcgacaccaccggggcgacgtgccgggcctgtgccgctacgacgaggacgcctacctgcactgcccgtatgcggatccgaaccatcggacggacacccgagcgagacgtcatccgaaggaccagaccgggcgggccctgtatggtctcatgcgcggcgagttcgaccgggtggcgctggcgtgggaacggttctccggcatccatctggggccgggggccgcccgtgacatgcttcgcaaatggcgggacgaccaaggatggcgctactacgacgcgacctacggcaatctgccgcagatgctgttcttcgcggccggcggacagaacctggtcaaacgctacatcgtgccggacagcccgttgcacgaacggctgaaaggcgtgccgcgggtgagattcacaccgacgcgctcccggtacgtgcaggtggacaaggccgggccggggttccttactctggatttcctgctgtacgcccggcgcatcgaatgggacggacagcacatgaacgagacgttcaggctacgcggtctgctgggccgcgatgacgggcaacaggccttcgatgacctgaccctcgacgtcgatcaggactggctcccccacacagcggacgcccagcccggccgcgacgagcggctactcgacatcgcgcgggaaacgctgcaatccgacgcgggtatcccggcagatcaataaagcgttatcaatgcaaggagaacaatgatgaacgagaacgacaagacggaaatcctcgaacccgtcgaaacacccgccgagaacatcacagagccaagcaaggatggaaggaagtgtccgaagtggctgccgcccctggtcgcggccgtctgcgcggtgattctggtcgtggccggcatcatcggctggaacgcttacagcggcgcgaagctcgccgaggccaaggaggcgtgcgccaccgccgccgacaccgtgcgcaacaatgccaacgaatacaacgcgctgctcaacggcgatgccgccgatgccgccgccgtcaaggccgaacaggtcaaggactcgaagaccgtcgaatccttgggcaaggagctcaaggccatggcacccgaatacgaggctgcgtggccgaaaacgcgcaaggactggatgccgccaccgtgaagctcaatgaacaggccgactggtacgagacccacgagaagagcctatcgaaggcggtgagggccgtcgccgaatccaaggccgcgaagaggctggatgacgcgaaaacgaatctgacggcgaagctggacgaggcgtcgaagctgctcgcggattcggacggcaaggtcgcggacaacgccacccgcgacgcattgtcgaacgccatcgacgcggcgaacgggctgaaggacgggaacgatccggcgaagatcgacggggcgcgcaaaacgctggaggatgccatcaatggcgtgaacgcgagcgtccaggcaaagacggacgcggatgcgcaagccgccgcagcggcagcagcggcagcccaggctcaggcgcaggcccaatccgcctacaacggcggctcctcctactccggcggcgcgtacgggcgcacggaaggctccacttccggctccaacacataccgtggcaccacatcgggcggcaccggctccggctccacgtccggctccggcccggccggcgccgccccaaagccgaacctcaacggcgcttacggctgcggcaacagctgcaccggcaaggatgatggctattaccatcactgatcgatgaatgactgattatggctcgtatcgggaaaccggtacgggcctttttcatggatttcgcaaaggaaagccatgtccctgtgaacctgtgcccccgcattcccgtgtacccgtattgccgggaaatacttccggattttttgtagacgccatgctccgtggttcggcgtgtcgtctgtgaggcttgttggtggctgccgtgccaaccggtggctacctcccgttattcctgcggtcggaagccccgccatcccttgaaaaaagaggcggcggggccatgaccggaaagtttgagggaggggatgaacagacaaggttaacggaggttcatttacatgaactttggcaggaagatgatgaaggccggtgtcgcggcggtggctgcgatcgccacgcttggtgccggcggcgtcgtcgcatcgaccgcgttcgcgggcggtggcggcggcaaccagcccggcacgggcggcgacctggccgcggtgcagttctggcagtacaaggacgatgcttcgggcgcatggggtccggccacgagtcttgattcggtgcgcgccgccatgaacaatgccggcgtgacgttgcaaggcaatggcgtcacgaaggcgcaggccgcattggaccaggcccgcacggaatgcgagaccggtttccagcggcgtcaccccggcgagggcaacggcgactgccgagtggtcgcagtcggcgcggtgccagccgtcatcggcggcaactacatctacaacgggtccggctgggcttcgccgaccgggaccggcggctggtacgacaactggaacacctacgtagctccaggaacataccagtatggcagcaccgtatataggacctcatatccgttcgatgatgatccgtcgaacagcgtggatgcgattatgcgtcgtaatgtggaggcttccagcaagccctcgatcgtggtgatcgtgctggacaagtaccagcccgcgccgccctcatatcacctgagcatcagcacgcaggctgcggagatgtcgggccagtcgggcgacaccaaggacgcttcggacacgatcaccctgtccagcgacgggtcgaagaccgagaacgtgaacggcaccgcgaccctgcactggcgcggcatcgacggcaccgagaagacggtggcgaagcagttcaccgcatccaacaagggcagcgccacagtgagcgcgtccttcaaggaaatggacgcctcgtgggagtcgtggcctgcgggcaagcgctggtgggacgttgacgtggcgaagcagggcaacatggccgaggcggtctcccacaagggagagaacgacggcaaggagtccggcgagaagaccaccaccccgcccgagaaatggctgaccaacgaggccggccagacggtgcaggacggcaacgactccatcgcctccggctcgctgtacacggcgcacatcaaggcgcattccaacgcctccgacaagttctggatctacgatacgatcgacaccagggacgtggtgatcggcggcaccgagcaggacgacgtgagcaaggtgaccgtgaccgacgcgaacggcaacatcgtgccggcggacatttccatcgacgattccatcgatggcaagcgcgtggtcaaggcgcacgccaccgccccgcattccggcctctacacgctgaacgtgccacagtcggccaaacccaccggcggcgactacgagatcaacgacggttccgtggcgtgctggaacggagacaacggcaccggcagcctggccgactgccagaccggcaacagcgacagcgtgggcaaggtcacgccgaccccggacaaggtgtgggtgctggacgagtccggcgctctcgtggccgaggacaagcaatggaccaaccagcagggcgtcgaccagaagacgttcctcgtgggcgaccaggtgggcgtggtcgtcaacggcagcatccccgcgcacctgctcaacccgctggcatcctattccatcaccgatgatctgaccggttcgaaccagtggatcgactggaagtccggcaaggtgttcgtcgacggcaaggacgagaccgcgaacttcaccatcgcgatcgaccggaaggccgggaccgcgaccgccaccgcgaagtccgcctacatcgcgaagacgatgttcaggaacagcgcgagcaaggtcaggttctacctgacgggcaccatcaaaaagggtgccaccgagggcaagaagatccagctgaccaacaaggcgtacgagaagtggaacaacgagacccgaccgaccaacgagccgccggtgttcgtgtggacgcccaaccccaacaaggcgtgggccatgaaggtcggcggcaagtggcagctgaccgtcgatccgaccaagaccgacaaggtgggcggcgacgacaagtactaccgtctcggcgacgaggtggcggcggtcatctccggcaccctgcccacaggattgggccgcgtgcccgagatcgcgtggaccgacgacttcgccaacgtcgatagcatcctcgacctgaaggacacctccaacatcaaggtctacgagcaggacaccaccgacgaggccaacgccagcgtcaacgacctgaacaagaccggcagggacgtgaccgaccagttcgacatcaccgccgagggcaccaaggtcacggtcagcgcgaaggactcctacgaggccgcgcagaaggacctgaagaccgcgaagcagatcagcgtcgtgatcccgttcgacgtgaacttcgacaccgtgaagctgctcgaatcctacggcaagtccgagggcgacgagctcaacacgtgcgtggacccgaagggcgacgacctcgacaacaagggcggccagacggtcggcggcagcacggtggacaccaacacgccgaagatctgcgtgaccgttcccccgatccacaagcaggtcatcgccgaatcctcccagggcggcgaccagtccagcatcgacaccaagaccgtgttccccggccagaccgtggaatacaccgtgcgcgtggacccgcggatccctgcggaccaggcatattcggtgaccgccatcaagctgagcgacacctattccgagtacaccaccgcgaacaagcagaccctggagatcaccgacctgggaaccggcggcatcatcccgaagagcgcctacaaggtgcagtgggacgaagccaaccactcgttcgaggccacgttcgccaaggactgggttgccgccaactggaaggccggctccaacccgcgcgtgctgctgcgcttcgaggccaaggtgaacgaggacgcgcccaccgacaagaccgtcgacaacaaggccgcgctgaccgtcaacaacggcgtcaccccgtccaacaaggtcgagaacgagccgccggtcatcaagccctccaagcaggacacgcagaaggacccgaccatcaacatcgacggcaagaccgcgctgctgggcgacaaggtgtactaccgcgtcaacatcgacgcctccaggctcaccgacaccgcctacaaggtatggcgactgggcatgacggacgactacgaccaggagtacctgaccctcgacgcgaagcacgtggagatccttgacgagaccggcagggaccgcaccggcgagttcaacatccaggacaaggacggcgtgctctacgccttcgccaaaaccgtggacacccagatccccgcgaccggcgagaccgtgcccggcgacccgcaacccggcgacctgaaggcgtacagcgagaagtccgacaaggattacgacccgctgaaggacccgagcatcgaccagtcgctgctgggccacacctaccaggtggtcatgccgatgaccgtcaccaaggtcaaggacggccacacggtggagaacaccgccacgcaggtcacgaacgacaagcgcgacaagaccaacaccgtcaccaacccgctgaaggagatcaacccgaccaaggacgtgaccgtgcaggtcggcggcgacagcatcgacggcaagagcgtgtatctgaaccacacgttcctctaccgactggattccagcatcctgcccccggaccgcgcctaccagaccgtcacggactggggcggcacggaccagctgaacaccgagtacgaccagtacctgggcaactgggccgtctacgcctcgcgtgatttgtacagggacggccaggtgctcgcggccaggggcgagaagatcgcgggcagcggcttcgactcctcgaagttcggcggcaacctgttcaccgtggacgccgacgacaacggcaaggtcacggccgacgcgacccagacctacctcgacctcgtgagcgccgacaacgagcacgaggccggctgggtgctctacctccagtgcaagcgcatcgccgtggccgacgaggtgcccaacacgtggaccgagaccatcaacggccagccgcgcgaatccaacaaggtcgtcaccaagaccccggacatgaccccgagcatccacctcgaaaaggtcgataccccgaccctcaagcaggacggccaggagcaggcggaccgcgacgacccgaagcaggcgctgaagatggacgccgacaacatcggcatcacgttcatcatcaccaacacctccaagaccgacccggccaccggcgacggcgcatggtacaaggcaagcgacctgaacctcgccgactccaccatcgtcggcgacgcgcacgtggacatggattcgctcacctaccccgacaactgggccaccctggtgctcaagccgggcgaatcggtcagcgtgaccggcacgctcaagggcgtcaaggaaggcgatacccacacggaccgcgccatcgtcaccggcaccccgctcgtggaatgcgcgccgtccaacggcgacccgttcaacgacaagaccgacggcggcgaagacaccgatccggaatactccaccggcgacgtgaccgagatcgacggcaagcagctgtgcgccgacacccagaccaccagcaacaccgacgactggaacggataccgtgccaagccgttggcctccaccggcgtggccgtgctcggccttgccggcggcgctctggcggtgctgctcgcgggcggctccctgctcgtgttccgcaagcgccactacgcacagggttccggccgccacacggccgtgaacgcgggcaagtgaccccgtggcgctccggcctcgtcgtccgatgacggccggaacgcccctccattgacgtcacatgccggaaaggggcataaagctttccgaatcccgtgccccggacggcgcgtgaacccccaggcccttcgccagcctctcccccggcgaagggccttttccatgcccggaacccgtgaacccgtggaaccgtggagccgcagacccgtggaaccgtgctcccgatggggcctgtagacggtgcgccccgcagcggcccgcgacccggcgcatcatcgactctgacattgttcgcaccatcatcattcctctggaggttgcacatggctgacaggcaaaccgcattggccgtattcgattttctcgactcgctgcgcgccggacaataccgcatcggcgcggacgcggaaaaagaccatgccacggcgggactgctggcatcgctgtccggcgacacggggctgcgcgacgccgtgtgcgcgaagctgatatcgccgggcatggaacgcgcccgtttcctcatggtcgccgagcatgatccgcgcgccctgcccctgttcgcctcgggccaggtcaaaccgtggtaccaggccgactacaacgtgcgcgagatcgccaacagcgagttccaccaggacatacccgcactgctgtggcggctgtccaacagcatcccggattccgcgcgaagggagggcatgcttgaggcggccgcgtacatgagcttcatgcagggcgatcccgaggccgcgttcaccggccatctgggccggctcgcggcggtctcgcccgaaggcgaggtcacgcgctgcctcatggacgcgcacgagcacggccagcatcccgcatgggtcatggaacagcggcagctgcgcgaacggcaggccgacgccgccgacggcatgaccgccaccgcaccggaccgcccgagccttcgccagcgcctcttcccgaaccgatgaacacctccagcacggacccatgggagatgggccccataatcgccgccggcaccgccgtcgccatcgacacggcacgagaaccggaaccggaacgccggccaccggccgaacccgaacccgagcccgggcccgggctggagccggatgcgcgatgcgtggacgacgccggaagcgaagaccgggcgaacacggccgtcgatccgtgggagatcggcccgctgccatcggcctcgaatccggtggggaatgatatcccggccgatgccccggcatcggaaccgcagcacgttggcggtgccgtggagccggccgatctcgccgacacgatcgacctcacgccggtcggcgaccgggatgccgccatgcccgtgcgcgaatggaggcgcatagccacgaccgcgggcggcatcctgctcgcggcctgcgtcacggtcgccggcatgtccgcgtggagatcgcatgaatccgccacggccgcgcgcgggctggaacaggcgacggcggactgcgccaccgcccacgctgcggcgaagaaagccgaacagaagctggtcgaatatctcgacggcgaccggctcgcacaggcgaaagcggtcacggccgacaagctcgccgacccggaaaccctggaaaccctcgacaagctggccgaacaatattccgagggcgagcgaatccccgcatgtgccgccacggacacggaaacggccaacgccaccacatccaagctgcaagccatcgaaaagaagcacacgggaaatctctcgcggctgaagaaggcggcgggcgcggtgttcgcctcacggctggcccataccgtcgaacagggcgaacgattgtattcctcctccgaaggcaaggtgcaggacgaatattctcgcgccctgctgcgcgcctccatcgacaagcgcgacgaggaggccatcaccgacgccatggacaaggtgaacgcctccatcgacgcgaagaacaaggccgacgaggaaaggaaagcgcaggaggaggccgcagcggctgcggcgcaggcgcaggagcagagcacgccggcaccgcaacagtactcgtacatgccctccggctccgcttcgggctcgggttccggcccgacgggcggcggataccattcctccggcggttccgccggctcgaccggtggttccgcgtctccgggctggtcggtgcccgcgaacccggacccctcgcaactgcccggcaccgacccgagcctatgaaaggaccaacaccatgccacaactgaccacgttgatcccgtcgttcgcggcacccgtcaccgaccgcgtgtggctggtgggcgcgcacggcggtgccggatgcaccacgatccgccattcggatccggaacggttcgccgacgccggccgcgcgctgccggtgagccaggatccctccatgccctcgcgcgtcatcctgtgcgccatgggaaccgggagaggtctcgaatcgttgcgcgcgctgctcgccgaccagtcggccggactgttcggcgcatcgatcctgttgggcgcggccatcaccgaccccgtgccccgtatgccccggcctttggtggcggcgcgcatccaactgtcatccgccgtccgcgtgtggcggctgccccatatcaaagggcttgagctcgacgggtttccccggcgttatccggccgcgtactcacggcttgtcagggacgtagacgccatgccccgcgccacggcccatgtcggctgacgatggtgcatgaacctaacacgaaaggaacgacccaatgctgcatgaaacatacatgatcctcgccgaggccctttccgacccgaccccgtgcctgcctccgggattctcgggcccggtatccaccgccctgggctgggtgaaggcgctgagcctggtgatcggcgtggtcgcgctggtgcgcatcggcgtgcacatcctgcgccagcagggcgacggcgtgccggaccgcgacgacacgttcgacaagctcgtcaactgggtgatcggcatcttcctcggtgcgggcgctgtcgccatcctcgccgcactcggcctgtccgtcaccgcaagctgctgagaaaaagccatggaagggattcgacgcatacggcagcgcctgtgcgcgctgctgctcgccctcgcctgcctcatgggcctcgccgcctgcggcggacccgacttcggatcgttcagcaaggagctcacgttcggagacaagcagatcagcgatacccagaccacctacgtgatgaagatacccgaaggcgggctcggcgacctgatcggccccagccagatccaatgggtcatcgaccagtacggcgacccgcccgcccataccggcgtggtcgcggtcggcaccaagaaggcggcgaaggatctgctgaggaagtctccggaactgcaatgcagggcattggagaacacgtatcaggaggagtcgtccgacgagggcaaatgggagtacaaggattcctcgtgccggaagcagcgcaagctctcctggctggagaagaccctgtggaacatgtaccaggtgcagtcggattccacgatcgaatggctgtccaccagccgcaacacgctggtcgccgcgaacgacacggtatcaacgttgcaggcgaacgccacgccggactacgattcatggttcgcaccggtgaaccggtacctgcgcatcgcgcagggcgtgctcgtcgccgccgccgcgatcagcctgatcgtgctgagcgcgcgcatcgtgtggaacatcggtcagggcggcgagggccgtctgctcgaccgcatcggctggatactgctcggcgtgctgctcggctcctcgtgcgcgagcatcgcgctcacgttcttctcccgctcgtccggcggcaatccgggcctgccgtcatggacgccgggcggcggcaccacgttcttcctgtcggactacatccgtatgcaggttgacccgttcctgatcatcgcggccgtgtgcggcgtgatcgcggccggctggaagctcgtcacccaacaggagggacgtgacctgatcccgttgggcaaggcgttcatgtgggcgatcctgagcgccgtgtgccttgccggactggtcaacatgttccaggccacgttcgacacgtggaccgccgccgtgctcaggtccgcaagcggcatgatgagcgacgcctgggagtcgaaaagcctggccgcgagctcgttcttcaacttgggcgcgcccgtcgccatcgtgctcaccgtcgtgatgtggatctgcgggctgatcagcaagatattcgcctacttccgcgccgggatgctgccgatcctggtgggcgtggcacccatgtgggccgcgatgagctggatggagaccggcaagcaggctttcgccaagacaatcggctggctggccgcgtttctggcctacaagcccgtcgccgcactggtcatggcgaccggctcggcgatcatggccacggccgggcccggcgacgacagccaggccatcacgttgatgctcaccctgagcgtcatcatcctccttcccgccatgatccgcgtgatcgtgcccgcagtgcaatcctcggtcggcggtggcggcggcggaatcctgccctccatactcggcatgggagtcgctttggccggtgccggcgtgcgcaaggccgcaggaggcaagggcggcaggaaaggcggcggcgacggacgcggcgaatcgtcaccggacggtgccagacccggtgccggccgaggtttggccggactgctttccgggctcggccgaaacggcggaaagccgcagggagcgaacggcggcggcaagcaagccaagccgctggacggcaatcccacgggcggcgaaccgcagaacaccggcgacaagccgcagggagcgaaccgcaagggcagcgacggcaaaccgcagggagcgaacggcaatggcgcggggagcccggttccaccggcacccgatggcgcatcccctgacccgtcaggcggcaacaggccgcagggggcgaacgatgccggcgggttcgcccgcgaggacgccccggacggtgccgaccgctctaccactcgcaagggcaagacattctgacgcatacgttttgttaaggagattcggataatcatggcgtcgaacacgacatacggcgattggatgcggccgatgccgggcggcatccgcaatatcggcatcccgctgacgatagcgggcatgggtgtgctgacctgcacgctgctggtcagcatggcgagcgtggtcgcggccatcgcgatcctcgtggtcggcatgggcgtcatcctcgtgctggcgatccgcgaccgcgagcaccgcaacatggtggatcgcaccgtggagaagcgcacgtggatggccgcgcagcgttccggcgctaacctgtatcgttccggcctgctcgcgccgatcgacggcggcaaggccatgctgccgggcatcctctccagggtgggcctgacctccgccctggacgggctgggcggcgagttctgcttggtgcggcattcgcacaccggcgaatactcgctgctcctgtcatgccagccgcagggcgcgagcctcgccgacgacgacgtggaggattcgtacgtggcctcgtgggccgggctcatggaatcgctcgcctcggaggccggcgtcacccaactggccgtgaccgtggacacggcacccgattccggcgtgaggttccgccgcacgttgagcagacgcatcgtcagggacgctcccgagctggccgcgcgcgccatggcgcagatcatggaccagtacgcggccggcggcgcttccaacgatgtgacgctcaccttgactttccgctataccgaccgtgacggcaaatacctggaggccggggaggccgcgcgtcgcataagcctgctgctgccgtcgatccgcgagcagatagcgcaggcgggaggcggtgccgcgagggccctgggcatggaggagatcacgcgcatggtccgcgtcgcctacgatccggccgctcaggagacgatcgaggaatccgacgagccgccgtacatcgcctgggaggattgcggacccgtctcccacgaggccggctggagccattattcgcatgattccggtttgagccgcacatgggagatggtggatccgccgaaaagcaacgtgaccgccgacacgctcacccggctgctttccccgttggcggactgcgaccgcaagcgagtgaccgtgctctaccggatgctgccgcccgacaagacgatgttcatggccgagcagaacaggcagaaggccgcgaaccaggtcagccaggagaaacgggccacggtgaggtccatgagccagatcggcaaggccaaccgccaggccgtcgcaacgaaccagggcgcggtcatggtgttcttcgggatgctcgtcaccgtcaccgtgtccaggggcgaacaggaaagccaacggctcgaagccgcgtcacgcgccgtggaacaggccgcaggcggcgcgaagatcgacctgcgcccctgctacggggcacaggacacgggattcgccgcaagcctgccccttggattgaacgtcagatcatacactccagccggccccctcggccggctcctgtcctgaacggaggacacgtgatgccgatgccatggaagccgtcgaaacggaagggaaccatgccgagcgccacggccacggaccccgtggctcgcatggaatcaatgctgctcacaccgttgaaggccaaaccggacgagcccgtgcccccggtgccgtggcgtggaagaagatcgcgcggcggcggctacgcggtcctgatgcccacgatcgacgagttcttcggcacgtcgaaccaggtgtgcggcgggttctggccgttcggcaccgacatggccctgccggccgagggggtgccggtcgggcgaagcctgatgacgggtgccggcgtgtgctgcgacccgatcagctggttcaaggccggcatcatcaaacagccgagcatgttccttctcggcctgccggccatcggcaagagcacgttcgtgcgccgcgaggtgctgggactgagcgccctgggcatgaacgcgatcatccccggcgatctgaagcccgactacgcctcgctggtcaacatgctcggcggccaggtcatccggctgggagcgggcatcggcgtggtcaaccccctggaccccggcgacctccattatgcgctgcaacgcttggagggcaaggcgcgcaaggacctgacggactactacaacgacacgagggcggcgctcatggaggtgcttttgacgatcatgcgcaccggccgcgagaacgacaccgatgccggtgccaggggcgtgaccgcacgcgaatccgatatcctttccgtcgccgtgcgcgtgctccacgaccggcatggcggcgatccgcagcctcccgtcatcgcggacctgcgagacctgctgagggaagggcccggcgaggtgcgcacggcggcggtctgggacgacccggaaaacgacgagctctacagggcgcaggttcgcggccttctggccgacctgcacgggttctcgaaccgcatgacgaagttcggccgtctgttcggcgaccagaccaccgcgcgcatcgacctgtccaggcccgtggacttcgatatcagcgccctggcccagtcgggcgacgatgtggtcgccgccgtgctggcgaccacgtggacgagcgcgttcgccgcgaagaacgccgccgacgtgctcgccgaggagggattgcagccccggcgcaaccacgtgatcatcatggacgagatgcaccgcgctttgcgcgccagccccctcatggtcgaaaagctcgacctgctcacccgtctgaacaggcagtggggcgtaggccagatcatgatcacacacacgttcaaggacctgatgtgcatggagaccccggcgcagaacaccaaggcgcgcggcttcgtggaacgcagcgagatcaaggtgctgggcgctttgagccgcatcgaggtggaccgctacctgcgcggcgaatgcggactgcccgtatcccggcgcgaggaggacatgctggaggattgggccacgcccgtcaacttcggctccgacgcctcgcacaagggtctgggccgtttcctgatcaaactgggaggactgcccggaatccccatcaacgtggagatgtgcccgctcgaaaaaagcgggttcaacgatacgaacctcaaatggcacgcctagaagggaaccctgcgatgacagaccacctcgccaccggcatgaaacgcatgatccgcaccgtggcacgctccgcatccctctccgaccggctcggcgagcgatcccggctgctgcggctgacgggcaaccgcagcactctcgacttccgccccgccgagcacggcgcatcctcatgggacttcgaaatgtcgataacccccaccgagcccaagccgtacggcaatgcggaaacccgtgaacccgtatggcgtgagacggtcgattccgccacctatggcgaatcgagggcgcgggtcgcgcacgccgtcgaaacgttcagaatatacgacaacaccggcatcctgccggaaacggaaaaccggtgaaaggaccacgatgaacgacgccgcactgctcgactcgctgcacgccgcgctgcgcaatcccgacctcgcatggtacacggaattccatgccggcgaatccatcgtcgccggctacctcgattccctgacggacccgtatgacgacgatgccatacaggttcccgagggctggttccgctactcggtcgtcacccgtgaaggcgaccacgcccttccatggatggagcactggaacgaatacgagtattcgatcacccatcacatcgattggaacggcaaagggttcacgccatacgacctgtactgcacacaggacctcaccggcatgatcgccgacggctcgctggcctcgatccgggaggacgcgcgaaccatattcaaggaccggtccctgacggacgactgccttttcgccaactccatctggcccgaaccggaactcctcggccttgtggacgacctgaccggccgcacgggacgaaacctgtaaggaccctgtagacgccatgccccaccccgccatggccttggactgatgatcggggtcatggcgggaacagcgggttgccgccgaggattgtcaaggagccgaacatgcctttggagaacaccgatgccgaagagcggatcacacgggagacgatgatcggatggatcgagcattggggcgaatcgtatgacgacgtgcgacccgatgacggtgccatgcggctggcgaaccgcatcatcgaatacaacgcggcgactgaaaccatcgaggcgttgcggaaccccgatgccgtgtacgacgaactggcatccattctccagccggtgctctcctcgatggacggcacctatttcgcgggctccgaatggttcgccggcgaagtggaccgcatggaagcggaccgcatcaacggggagcggccggaggaaacggacggcctggcctccgaagagccccgcatcccgttcatcgtggagagcgaggccgcagccgccgatacggacgaaccgccgttggacgagctgatcaccgcagccacgcacaaatatctggactcgggcatgacctacgacggattctcggaacatgtgcgcaccatctggcgcaacgcggcagcctacgactggtcgaagctcatggccgaacagcgctccacgggcgaatggtcgtccgacgcgaaccggctcgccgtattgggcgtgatgatgcagttcgcgcccgaatcaacatgcatgatgatcgccagcgacatactggccgagaacgctcccctatcccttccggcattgcgcgaacgcatcaatacgccggacggcatggtgaacaccgacctgctgttttcccggctgatcgacaacggcaccacgcccgatccggcgcgcatcgacatggcgatggggatcctcggcccgttggaggccaacgcgccgacggacgcctgctaccggatcatcggcctgaaggccatgctcagcctcgccatgggcgacggcgagaaggcgcgggaactcgccgaacaggccatcggctacgacgcctcggaccggttcgcgtcaagcgtgctcgaccgtctgccggaaaccgatcccgccatggaggcggcgaacgtgtgggagaacggcgggcatttggggcgctgacgtagacgccgtaccccgcgatgccaccggtccggccggatgatgggagtcgccgccgccattgaaggcgctggtattccccgaatgaaaggaccatcatcatgccacagccgatgcaagtggttcgcggtctcctcgccgcgaaccccgattactggccggcgaaaaccaacgcggacggcaccacgagctcggcgtacctgcgcgccaccgtgtatgaggaccgcccgcgagtccgtcagaaggacggcagctatacggacaatccgctcggcccggtgaagaccaccgtgaaattctggggccaggctgccgagctcctgcacggcatggatttccgccagggcgacgccgtggtggcgaccggccgcatgggcgatcccgacgccttcatcagccagaaggacggtaaggcatacgcgcgtccggtcgtgatcggcgattccatgcagatcgattccatcgtgtcccagcgcatccagctcgcccgcgaacgcaaacgccaggacaaggaacaggccggtgccgtggccgatgccgggcgaacggatccatggacggaccaggttgacgcctcgcgcggcgaatacgttggcgacggcgttccccgcactttcaacggcgagcccttcgaaccgctgtcgggctatccgacaccgggcgcggctcccgctccggcggaccctgcggcaccggatttcctttccaccccatccgatttcacgacgggcaacgcccgctagccatgacgcaagccctggcgcatcgacggcgggaccgcttccatcggttccgccgtcatgcttgaaaggagaaatgaatcttggccgacgtcgatccgaaactgcaatcgaaccgagtgaaggatctgggcggcacggtccgtcccagccgcaagatcgaactggcgatcatcgtcgcggtgtccctgatcctcacgacgttcgccctcgtgtgctcccatgcggggcatcccttccagatcttcgcgctcatgtacctggtctccggccaatggtcgctgaccgcaggccagtgggcgctggccgtggccgtgctcgtcgtactggccgtggcgtgcggcgtgggcgcgtggctgatcgccagcaaggccgtgccgtgggcaaccggcgccaaggcacgcacccgcgtggacgtgtacgcgcctgccatgggccatggcgaggccgtggagaaggtgacgcgccagcgcgccgaggccatggcgtcaaggctcatagaagcggaccgctaccgcaagggcatgtcgccgggatatccgctggggctcaacatcgtggacaacacgtcgatgtacaccagctgggaggacatggctatcgttctggcgggcccacgttccggcaaatccctgtgctacgcgatcccggccgtgctctcggcaccgggcccgtgcctggcgacctcgaacaagggcgatatcctcgacgtgaccgccccgatccgcaggctcgaccatccgaacggcgaaatatggacgttcgaccccgaacgcatcgcggacccgaaccggaagagcgcgccgtgggtgtgggacctgatcgcctcggtgcagtccatcgccgacgcgaaacgcatcgccgactgctggcgttacgcctcgggccagccgcagaccggcggcgacgacttcttccccggcaccgccgcccagcagctcgccgactacctgttcgccgcgcatctgggaggccgttccgtgtccgacgtgttcaggtggtgctccaacgagcgcgacacgtcgccggccgacatcctgagcgaatacccgcgctacgcgggcatcgcctcgcgtgtgtccagcgtgatcgcgctgacgccggaaacccgaagcggcgtgttcggcagccttcagaccatggtcgcgttcctcgcggaccccgagatcatcgactggatcgacccgcaccgggatacgaatgggaacatcgacgagcggcgtggtctgttcgatccctacgagttcgccacgagcgaggacaccctgtacctgctttccgcccagggccgtccctcgaccgcgttgaccgcgagcctgacggcggtggtggcgttcaccgcgttccaacgcgcccaatccgagttcaccggcaacaaccgccgtcttccggtcccgttgtgctgcgtgctggacgaggccgcgaacatctgccgctggcccgaactggcggacgtgtactcgtatttcggttcggcgggcataccgatcatgacgatctggcagaaccccgaccagggcagggccgcgttcggcgagacgaacttcggctcgttgttcaacaacgcgaacatcaccgtctacctgggcggcatcaaggacgcgaagttcctcggcgagatcagccagctggtgggccagagggagatagtgcgaggcagcgtcaacatcgacggcaacggccggcgcagcgtgaacaactcgatccagaaggagaacatcctcgacgtttccgacctgaccgaatggcccgtcggccgcgcgctgctgctcgcatcccaatcccgggcgcagatcgtcaagaccctgccatggacgggcaacaggcaatgggccgacgccctggcgcaggccaaggcgaaagcccgagaagagcagagaaaggccgcataatgagcgaacacacctcgaacaccacgtccggccctgatggggaggaatgggagcgcgcggtcggtgccgccaggaccctgctgtcatcggactgcggatggctggaactgttcacccgcgccatcctggaggagaagggcgtgccttacggcaagggactgcccaaccccgaagcgccgcacatccccgaggacaaggagatcgaagaggaaaccatgccgggccaaggcgagccgacgccgaccgcacccgaggtgccggcaggccggcacgcggcggaacccatccgatccgggattccggccgatgccggggaaaccggcaacggctacgagaacccgccggaagacgcaacggaccgtgacgacacccctccaaaggccggtgcggaggaatccgacacccgtatactgcccgcgccggaggggaagacggatctcggccgagacgaatccggcgacctcgatcccgcgcgggcaagggacgtgtccggccagttcggcgcgcgaatgcggcgcagcgagacctactatccgaacctcgccgcgttcgtggaaaggttcgtggccaacgtgttctgctaccaccagagcgcgagcgtgaacatgcaatgggtgagcgactggtggcgctatccggcgctcgtgttcccgctcgacgccatgtggcgcgcctacgagaacgcgcgcaaggcacccggccagatgatgatcttctacattcaggcggcgtcgatgctcgaccgcgttttcgacaaggaccgtggcatcgtcgccagcctcgactgcaagcagaatctcaccaggaagggcgaaccgctgccctgcgaacgcccgaaccgggcatggcgcgaaccgatcctggaaacgttgtcggtccccgccgcaggcggcaaggaaaacaaggaaaccaccatcacgccaacaaggaggagaaacaatggctcaaactgatcccgaggacggcttcgaccagatcatggtccagagctggaacagcgtcgcccagcagctgcgcaccctgcacaacgagctgagcggcgaccgcgcgcgccgcagggaacgcgccgaacgcgccgtccagaacgaacgctacgagcagaccagacggcagcagcaatccatccgcctcgaacaatgggagatggacaacagggaacgcctcaacaaggggttcgagtccaccctgaacgcgaccgtgcttgccgacggcgacggctggaggaagatgcgcgactcgtccctcttgcaaggatggatggtcgccgaccaactggagggcaacgaccccggctaccgcaggcagatcatcgaggcgaaggcccggctgaaggacgaatggtcgaaacgccacccggaaacgcacatcgacgccgcagccgaccaattgaccaaccacgtgaacatcacctacaccgaccagtcgcccgcgttgcaggccaccctgaacgccttcaacacggccggcgtgcccgtggacctgcaacgggtggaggacacgcaggcgttccaggccgcgcacggcgacgacgccacgttcttcgtggactcgcggctcaccggccaatggacgggctacgaccacgacaggatcgtcgaagccgtgatgtgcgctccggtcaacggcgttgacgacgcagcctcccggatcagcttcctcaaagaccagggcctgccggaatcctcgcacacggacaacaaggccacaggagacgagcccagcaccataagcgaggccgaacgcaccgagaacgctgacgccgcacccatcatcggaaccaccgcgcccgtgaaggctcatacgaaacccgccgccgatgagcgcaaaccggcatccggacccgagcccgagaccacgggaggcggcgacctgacgaccggggagcccgacggatacgaggaaccgcccctcgacctgaacgaacccgaggaatggaacgggcccgacccgttcggcgaatacagtcccgccatggaatcctccatgaaccccacggaccagccgatacccgaccaggccaacgtctcgacgccgcagatcctgcaacccgagaccaacggcaacgcacgctgacgccgatgccggcgcaccccttgccatgaggttcgtggggtgcgccggcatcggatggccgtatcatggtgtcaacggctttcggaaccggaaaggacgagcatggcacacgtgacgttggatctgtcgaaatatgatgccctgaccgcctacaagggtcttcccgacgagaaggaggagaacccggcgcggttcttccccgacacctcgtcggtccgccgttgcgtgcgcgaacgcatgtccgtcatgggtctcgacgccgccgaactcgccaggagagccggggtccccctctcaagcgccgaagagctcgtggagaccggtctgacctccatccgctacgtgtacaggatgttcgacctgctgcacatccgcaccgaaacgctgccgtccgcctacgcggggagactgctgtgagggaactgcacgcctgggagaacgggcatcatgtgggcgtgttctcggaagacgacgaggagcgcatatcgttcgcgtacgacgcgaacgagggtctgccgatcagtctgagcctgcccagaaccggcggatggagagaccaggcaccacgtaacttcctggacaatctactgcccgacaatccgaacgtccgccaggccatgcgtgagcacctgaatgcctcctcggccggcgtcttcgatctgctggaccgggttgacgccaccggcggactggtgttctccctctccccggaacctccaatcccatcgccgacgcttcgtctgatctccgattcccagatagccaacgaaatcgaccgcatcgaacggaccaggaactactggtgggacgaggacagccactgccggttctccttgggaggggcgcagggcaagttcacactgtcccgcgtggacggcaagtggtattggccggatatgatgctgccctccacccacatcgtcaaaccgaagccccatgaccttcccgaggcgaccaaggtggaactggcgacgatgcgattgtcggaactgtgcggcatcgacacaccggcacgcggcgagatcacggcgcagcgcaagacggcctatatcgtggaacggttcgaccgtcgcctggaggaaggccgaatcgtccgactgcggcaagaggacttcctgcaagcgttgggattgccgacccgcgacaaatacgatccgtcggccgatgactgcctggatctcctgcaacgcatcgatgcgtcgggctccctgtcctaccggtggctcgaaaggctggccttcaacacgtcgtccgccaacagcgacgcacatgcgaagaactattccctgatcctcgatcccgcatcggggatacgcctgtctccccagtatgatgcggtcgccaccaggtattggcccgagttcaattgggaactcaccatgccgttgaacaaggatcacgccttcgcggagcacaccgcgccccaggattgggaggatctggcgacacgtcacggtctcgatggttcgagggtggcggatatggcccggcgtatggcggggaaggtcctcgccggcatatccgaatcctgcgagggcctggacgcgcggatggccgatcgcctgaacgcgtgctggacgaaggcgaacgagtccatcgagccgatcatgccgggagacgagccggcgaactctctcgatccagcatcggctttgcccgattcgctcggttttccttcctcgggccgtaccatctgagctttttccgggaagcgtcctaacggcggggccggttctcctcgtcagaggcgaccatgctccatagaccgtattccggcgcgattccgtagcgttcgcgcagcatgtcgaacgtgtgcaggccctcgcgcatcgctgcccggtattcgtcgtcgtgcgccgcgctgttgaggttggcggcgatggcgaacgcttcggatacgaggcgttccatgtcgtgcgtggacagattctcggggtgtctttctcgtccgtcatcgaggaagggcgggcggttctccatcgcggcgcgccattcctggacggcgaggctgcggcttctggcatcgtccgcccagtcgtcgcgcagtcgtttcaatcgcatgtcgtcgccgagctcgaaggcgttgaaccgttccgtccacccgtccgtgctatgccacgtgatcctgtagccgaccacctggccggggtcggtgaacgagtctttggcggttcccttgcgcagcctggggtcgatggagaagccttccctgcgcacgcggcgtatgaactcgtcctcgctgtgcgacgccttggcgcacgcctccacgatccggccgacatactggcgcggcatcgttgaggcggcgaccgccgtggcgagccggctcctctcgttgccgtccaacgcatcccatccctcgtcgtcgccgtactcgtttcgcgccttccattcggcccattgacgccattgcccgtactgccagctgacgcgcgtgccggtgtcggaacgtgcgagctcgaccagttcggggcgcgtcttctccatccgcctgcatgatttctgcgcgttgatccggtcgtggtacgggtttatccacccgtcgtcggcggcgagctgcaccatgatgtgcacgtggtcgttgccgttggcggacagtccgtggcggaccgcgagccatgtgacgccctgatcgtcgtcgccgtcgatgatgttcatgcgcgtcagataatcacggatgacggcctcccattcctggtcggtcaggattccctgcccggccttgatggcgagcgagcagtgccacacgcgcttcctgccatgctctcgttcggggttgttcttgcccctcatgtcgggcgggaacggatcgtccttgcgttccctgacgcggtagcgtcggtcgaacctgcggcctatctccgcatacgacgccgccggcttgccatccatgtcaaacgagggaaacatgtcgccgctcgcgcacacgagatgctggtcggtgtgttcattgcgccgtcccttgccgaacaggtagcgcaccaggccggccgggtccgaacccctgacgatattcggtatcatacgatgattctccgcccgcgcgcccggcacggcggcgcatggcgtctatgagagatatgcgccctttgccggcacggccacttcgatagaattatcggaaacggataaggggctttgatggaaccggtgaggaacgatacgacggcggataggcgcacggccgtggaactggcgaagcggctgctggtcgatttgatctggcgcaccgccaagatcgaggttgatggcgtcaccttccccgacacgcaggaaatcttcgacgggcgcgcccccgagggtatgagcgtggacgatatagtcacggtgaacaacatcaagcgcgcgtggggattcctgctcgagaacatcgaccatccggtcgattggcagtacatccgcgaatacaaccgcatcatcggcgaaggccgcgtgcgcgacgccggccgcttgcgtgaatacggcgtgaggatcggcggcacgggatgggtgccggaaatccccaccgtcgaatccccacaggaaagggttcgcggcatcctggaggagtcagaaggggaggacactgcgatgctgctgttcggcgcggtcacgcggggacaatggttttcggacggcaacaagcgcaccgcgctgatggtcgccaaccaccagctcatacacgacggcatcggcgtcttctcgatccctcccgaagacaaggcacagttcgtctccatgctcctgcgctactacgagacgggcgactactcccggctctccgattggctctcacagaacgccgtcggccatgtgcccggcgggctgactctggcccaatcgtctggggccgcggaaaagacgaatgatgccgcgaacgggatgggcatcgtgcccggtgttcccctcgatggcctcgatggaggttccggcttactgaggtgacggtcgtggcgtccgggggtgctcccgaactccatgggattatttacggtcggcttgcgtgatgatgacttcgagccggcctataacgatgtccctgatcgccgcgacggtgggcggataaacccgtaccacgaccggatcaacgcgcagaaatcatgcaggcggatggagaaatcacgccccgaactggtcgagctcgcacgctccgacaccggcacgcgcgtcagctggcagtacgggcaatggcgtcaatgggccgaatggaaggcgcgaaacgagtacggcgacgacgagggatgggatgcgttggacggcaacgacgcgctcagaagactgctcggcaccggcgaggaccgcaaggcctcccaaggacacggcatacccaccgcgctcatgtacctaggcgacgatgacgcgcccgtggtcgccgaccttgaaaccacatggtacgacgcgcggcgcaacaaaccgaaccgcagcgccgaatggcgtctctactacgcggcctgcgaaccgatccgcatggcccgtcccggcgacctcatgtgcttcggaatgctcagggacaatcgcctgctgatcgtcatcacacagcatgacagcacggccgaggcccaggccaaatggctcttcggcatcgacgacgaacaggagggcgcgttccgtttccatgacaacacggaacgtgaactggatgccttcggcgcgcagatcttcgaagcgctcggcatcaacgtcgaggtgcgggatgacacgcatctccccgagatgatcggccgatggggatacaggttccccagcaacgaggagttcgcgtccttctcccaatcctccttgacggacgtggatcccgcgcacgacgacccggacgacgtggtgatcgaatactacgaccgcagctacctgctgttcaaactctatgagcgggcggtcatccaacacgactacgatgccgcgccattcgtgtcggacggcatcatcgacgttgactcgttcacctcgttctacacttccgtacgcaaccggcgcatgagccgcgcaggcaaggtcctcgaaatccacatcgcccacatcctcgacgcgcgcggcatcgaatacgaggcccaggccaggacagaaaacgggaagaaacccgatttcctgttcccctcgcaagccgcctacgaggatccgacgttccccgagacgcagctgcggatgctcgcctcgaagacctcgatcaaggaccgtttccgtcaggtcgccgacgaggccaacaggatcagggacaagcacctattcaccctgacccccggcgacgtgacccatcccaagctcgcccaactcgatgaactgcacatccacctggtcatgcccaaggtggtcaaggaatcatacgacgaccttatccagggggagaccatgacgttctcccggttcatcgaggaggtccagggacttcaggcgggccgtcctcaaagcctgacccttctctgacggcccgacgggagtcctccctgatttcgccgacggttcggcgacggcggcgacgccgttcctgaagtagaattgacggaaaagcaaggagccacgatggatgtttcgatgatcagacggccacaggactggcctttccccatcccgcagatcacggcggagagcatagacgagctgatcgacgcgctgcaccgggacgtgtcggactcgactctgagcatctactacgacgccgtggacggatgcagccgcgagatggagaacgaggatcaggagatgatggtacgcgagtactacctgcatgacggatgggcggcgaagcatggaacgggtgcgtgatttctcgccgtatgagttgaaggtcagcgtgtatgacggggccgccgaaaagcgaaccatgctgatggacggccacctctacatggtcaagttcgggtatgacgccgccccgcaggaggagcatcccagtcgtaccagctacgtcaacctgcccgtcaacgagtatatcggctccaaggtgttcgccgcttcgggcatccccacgcaggatgtcattctcggtgattacaagggccgttccgtggtggcgtgccgtgatttcatgtacgagatggatccgaacctcatgctgcttcatttcaagcagctggaaatcagcatgcccggtggaagcagccgatcgaaggccaggcccgattgggagttcgtcagccaggtccttgacgaacatgacgcgctcgaaggcatccgcgcgcgggcgcggcaccgcttccttcagatgacatgcgtcgatgcgctgatagggaacttcgaccgccacgcgaacaactgggggttcatagcggacagaaggaccgcggatattcttgatctcgcccccgtatacgactgcggttcgtcactgtccccgagcctgtcccgtgaaggcatgagggaacgggtcgaggatcctcagcaaatgcgtgaggcgaacatggccgcaccctacatggcgatgaacgtcggcggcaagcgacgcaagttcgccttcttcctgacctcggagaccgcacgcccattcagggcggagctgccggaactctggccgcgcctgtccgaggaggtcacggaccgcatcgtggagcagacccccggactcgatgaccttcaacgtgatttctataaggccacgctggacgcccgccgcaagtacgtgctcggacccgcataccggatggcactcaaagaagcggaaacctccaccgccaccgtcgggaacgacacccttgcgaccgacatcgttccggggatcccgttccctggccttgggggaaaccccggtctcctgcactgaggactccacgcggctcacagtccgggaaggtcctcgttctcgccgtcaatcgttcccggatcgttcgatgacggtatcaagatggtcgattagttcccggcattgccggacggcgtaggacgccgatgcctcgtcctcgatggtcgcgttcatctccctgttcgcgttgtgcgcgatctggttgacgttgcggccgatgcggcgcagctggtattcgatctccttgagcgcctggacggtgggcgaatcgcgttcctcctccttgacttgcagtctcccctccaacagtttcacagcctcgatgatggtgagggagaccgtctggttccttttcttggcggcggtgcggatcatcccggcttcctcctcgttcaccatgagatgcacctggatggagcgctgctcgccccctcctttgctgctcctctttcgcattattccgattccttcctcattggccttcggcactcgggttgttgcttcagcgccgtagggcgcgggaggctgcgggctcggttcatgtacatgaaccgtctagcttgcttaccttcgatttgatgggcatctccatgtggatgtccatggacatatccatgtggatgtctatggacgtgtccatgtgggtgtccatggatatatccatacgagcgcataggaaaacgcatgagggtggatgatcgttcggggtgatgccttcttccacgaatgggaaggggctcttcctttttttggaatgtcatcttcccgcatccttcgtcttgagctccttgagcagcatcgtcgcgttgtcgcggatgctcgcgtccgtgagcggggagagctcgtccgcataggagcggcagaggagcgcgtacacccgttcccgcacccaggcgctgcgcgcgatgcccagcttgaacgcggcccggcacagcatctcgtattcgtcgccggtgagcatgacattgagctggcgtccctgcttcagcggatgttcggggtcggggtcggtgcggtacacgtcgttccaatcggtggtgccgggggcgagttccgtgtagctgaacggctggatggcgtatctcacgaaacgggatttgggtatgcccgtcttggcggaggcctcggcaagcagattgaacagctcccggtccatgaggacccggaaggcgtggctgtatcgtcgcatggtttcatcgtctccttggtcgttgccgtgcccggcgcggcatggcgcgtcgggcacggatggttggcgtttggtcagcggtcgaagtcgaacgccgtgccgcgtaacttgtcgatgcggatggccgcgtcgaacttcttcccggatttggatgtgaagcccttcagcgtgacggtctgtcccgcgaggagcctgcgcgcggtctggtcggtgatggtcttgcccgcgatgcgcgcgaacatcttccatccgcagcctgcggtcgtggcccacttgccgtccttggtcttctcgcttttgttcgtggaacactgccacatccggccggttttcctcaccggctggccgcagcgcgggcagtcgccccaatcctgcgcgtcggtgttcgcggttcgtgtgacggcatcggccttgaggttcgcggtcgcgtcggcggggattcgcaatgcctcccggtggaacatgtccatcacctcagacgggtcccgtttgccgtgttccacgtcggagagcgcctgttccatccgcgcggtgagcagcacgtccttcagtcgtggctccaccacgtcggtgaggcgttcgccttccgtggtggcgtggagctgacggcccttgcgttccacgagtttggagcgcacgagcttttcgatggtgtccgcgcgggtggctggcgtgccgatgccgccggaatgtgattcgtcgtcatcgagcgccgccttgaggcttttgtcctccacgtaccggctcgcgtgctccatcgcggccagcagcgtggcctcggtgaacggtttgggcgggcgggtctcgccttcctcgaccgtgaccttcccgaccgggcgaatgacgccgccttccatgaggttcgacgggatcacgttccttcctcccgccgggttcgcggtttcctcgtcttccggttcgggcccgcggccggtttcgacggccttccatcctgcggatacggtctcgtcggatcggctggagaactccctgtcggtgtcgtcggaaagccgtgccttcacctcggtgacgatgtgcacatggtcgtcgcccacggcctcccacatgcggcgcacgatgcgtgtcatcaccttgcgttcgtcatcgtccaggccttccagcttcccggcgtccaattgcatggtcggcagtatcgcggtgtggccggccaccttcttgtcgttgacggtgagttccgggcgcgggtgtccgggtatgccctcgcgggtgacgaacccgtgggcgagacggccggattcgaggagcgccgtgagcgtttcgaggtcgtcgtgcgtgatgtaccggctgtcggtgcgcggataggtggcgagtttgagttcgtagaggtgctgcaacgcctggagcgtgcgtgcggcggtcatgccgtgcaaccggctcatgtccttctgcaatccggtcaggtcatacaggcggggcggccggtcgttcacccgcctccggttcacggacatgatgcggaagcggccgcgttcgacctggccgcacagcagcatcgccgcatccttgctgtcgatccgttcgctggagagccgccatccgcccatgtccgcgatcacggtccagaacggcaccggtttgtggttcctgatctgccggtcgcgttccgcgatcatggcgagcgtcggcgtctgcacgcggcccacgctgaaccgtgcgttgtagagcagcgagtacgcgcggctcgcgttcatgccgatcagccagtccgccttcgacctgatctccgccgaccatgcgagcccttggtattcggattcgggtttcatcgcccgccacgcggcctggatggcctccgcctccaggctcgccacccacaggcgcagttccggcttgtgagagccttccatgtccgcgatgcggcggaagatggcctcaccctcgcggtcggggtcgcaggcgttgacgaggcaatccacatccgttcggcggatcagccgcacgatctgccggtagcgggagccggcaccgcgctcctcgctgatcttccaccgccaatggccggacgggtccacaggcagcgtgtccagactccatttgtcccaatccctgtccttgtagtcctcgggcatggcaaggtcgatcaggtggccctgcgcccatgtcacgagcagctggccgcactcatagcatccgtccctttggacgggcgcggcgcacaacgcctgcgcgatggccgtggcgaccgatttcttttccgcgatgacgagtctcattctttcgcgttccttccgattttctggattccttgattcttgtccgacatgcgagggccggcgcgggaatcccttcccggccggccctggatggaaaggcgtcgccaaggtcaggcggcgaagccgagcagcggcgcgaacacggcggcgatggccagcaccgcgatcagcatgaggatgacgccggcgatccacgcgatggccgtcaccagcgtgcggctccaggtctgtccgccggattccacgatcatcgggctgcccatgcgtttgccgatgatcgcgcacacgcccgaggcgaccacgcacagcagcacgagcaccacctggagcatcccgttgagctcgaccagccacgtccacaggcccatgaaccagccggcgagcatagagagaaacgattccattgatttttcctttcacctgattggaacgacgcttccgattctcggccgcaaaacggccggacacggggcatggcgtctacacgccccgccttccgccatgggaatgtagacgccatgccccgtggaacgcgcgacgggaaggcagactcgccttgacggaaaaacgagcgaaaggaagatcgtcgtggcgaacaaccagaacaccatgcgtgacatgaaacgcagcatcctcaaggcggtgcgcgacagccagaggacgaaacaggatgcgatggacgagtacgtggcggcgcgcgtcaacatcaaatcattggagggacgtctggaagaggcccgcgagaaggccaccctgctgcgcaggaaggcgaaggacgcgggaaacaccagcgccgaactgaaaacggcggacgacctcatagacgcgcggtggacggggacggaagacgggtcggcggaagacgggtcgcccgaaaacgcggatccgggaaccgtgaaccccgagcgggagcatccggccatggaaggaaacacgcaaggcggcatgccgggcgagccgaaccgttgggaaggcggtgaatcgtgaaccggccggaaccgcgtccgctgccgaaaccgctgcgcgtcctgtgcctgttcgtcgccgcgctcctcgtgtgctcgctgggcgtcatcgtcgccaaccaccagccgtcaacggccggcgacgaccacggttccgcgacggacgcgaaacaggagtccacgggcaaaaggaaaacggaatcgagcccgcaacggtacgccggcctggaggcggcgggaatcccggttcccggcgactggtctcagcgcaccaccgcgttccccgttgacacccacaaggacggcacccgcacgctctccgaaaacgcggacggcatcacgctgcacaatggttccggcccgatcgacaccgcattggaaacggtggacgcgctgctcgatccaaacggcagcgacgacgaatggcgcaacaacgtgttcgcgctgctcggcgacgacggtgccggggaaagccatccggtctccgacgcgccgcgctggtggtggacccagcgccgcttccacgccgaatccgtatgctcgggccaatacgatgacaagtacgtcaactacgcctacacctgcacctccgacggcaaatgggagggctcggatacggatgccatccagtcccagccgttctggacgacgaaggaaaccagcttcccgatcccggaaggcagcggaccgtcatccacgacggatccgcagcagaccgtcagccaggcgtacaacaccgtgctcttgccgatggacgacggcaactggcacgtcaccgtctactgcccggccgcgctcgacgcgtcattgctggacaaggatgccaacgagctcgaccccgatcaggtgaaggccggcgacgaggcgtacacggtgatctccgccaccggatacggcacggtccagcatccctgccggaccgtggaggtcgtggtcggcgggcagaagcccttctggtcgctgaggaacacgcaatgagccgggccagccgccatcggatcctcgcggccatgctctcggcgtgcctgctgtccctgctcggcggatgcacgccgttgaccgtgctcgcggtcctcggcggctgcaaggacggcggctccaacggatcgtcgggaggcaccacgggaagcgtcgtcaccggcgaggtgcgtgacggcatgaccatcgcgcagacaaaggcgtggttcaacggatccgacgggcccgacaacgtgtgccaggcctatccggacgggcaatgcacatggtgggcgtgcatgagaggccataaaaacggattggacgtgggctcctactggggcaacggcggcgactgggccgccagcgccaccgccgccggatggaagaccacccgcaccgatcccgtggccggcagcatcgtcagctacccgcccggcgtggccgacgcggacaccctgtacggccacgtcgccgtcgtcgaggcggtcgaccggacggccggcaccgtgaccatcagcgagatgaacgggcgcggcggcctgggcatcgtcaaccaccgcacgcacaggatcgacgtcggcgcggtctacatcctgcccaacggcagtgtgtccaccaatggttccgccggcacggattccacgtcatccggttccgaatcgtccgattcgtcgtcatcgtccgactcgtcctcctcttcggatccggtggaggcggcatggacgtgctccagttccgactcgggctccacggacgtggtggtggactacgacggcgacggcacccacgccacgccggaacaggcccgggccatcgccaggaagatgatcgcctcgtacaaggactggggcgacggcgactatgacgcgctcgtatggctgtggaacaaggaatcgggatggcagtggaatgccaccaacccgagcagcggcgcgtacggcataccccaggcgttgcccgcctcgaaactcgcctccgcaggagacgactggaaggacgacgccgccacccagatcaaatggggattgaactacatcgccggacggtacggcagccccagcgccgccaagacgttctggctcgcccacaactggtactaaggagcgggacacgtaaagggaccgagcatcaaatctcggcggaatcatctgccccgtagacgccatgccccgcgcgaccgcccgtatgggctgatgatcggagccatgcccgccggacggcgcggcaccgatcatccaagggaaggaaggacgcatcatgctgatggaacccgatgaatacacgtcccaggaacgggccctgaccgacaaggcgaaggagctgatcgagcagcacgagctcgactggggcaacggggaatgcttcatccaacgcgacgccggccacagcgaactgtacatgacgctggaggcccccaaccacgccacggtcacggtcacggtgccggccgaggcggacgagaaggggctgaggcgcgccatggcggacgggctcctcgacttcgaccccgacgaggagttcgacgaatgctggtcccgcgagttcgcggcacgcaacgggttcacgccctccggcttcctgtccggcctccaggaagacaaagcgtttttcggtctccgatctgaggcgttgcttcatcccggtcaaagcaacgccgggcaaggcaacgaaacgattgcggagatccgctggacggaggaggaccttcggcactggctgaaagaccatgactggcccgacaacaacgagaacatggacgcgatgcgcgacatgatctcggccagggaattgcgggaccgcagcatcgaggagggatgggagatcatcgacgcgatggtggacgacggccggctcgcccgcaaagacgaaggcgagaaggccgaaacgtccgaaacctacgatcccgcgaacccggccgacccgttgagcattgccgatacgtctgcctcggccgcagccacacgataaaagacccgagcgaaggagcatcatcatggccggattgaaggactaccagatcagcgtgtacgtcgccaacctgggcaaatacgcggagggcgtgttgcagggcgcgtggatcacgctgcccatgcccgccgaacgcttgcaggacaccctgaagaccgaggtgggattgggcggccggtacgaggagtacgcgatccacgactacgagggcggggaaggactgctcgccaccgtggcgaatcccggcgaatacgagtcgctgacggacctgaacctcatgtgccgcgcgttcgaggcgcgcgaggacgacgacccggacgtgtacgagaaggtgcagacggtccgcgacgatcttgacgcggtcccgcgcaccccgttgcagtacgcgaacctcgcgttgaactcggacgagatcccctatcactcttatgatgcgccgtcctcggccgaatcgaaggaggcgaagtatgcctggaccgccgtgaaccatgggtgggcatcggatgccgtgtggtccatgttcgatacggggctcggctatctgatcgatatggagatgtacggccgggacctcaagctcgacggcgatgtgtcgcttggcgacgattgtgataggtgtacatgaatatgcgtttttgcgtatgttcgtgtatactcacaaacatgaaaaggagcgaggcgattgaccagctgcgcgagatggacgccaagtactcgtgctacgtgtattgcaagaacgaactggccgtcgtgctgggtgagcaggggcagaaactgaaccgaaccctgtccagcctggtatcggcgaaggcgttggtccgtgccgcccgtggcgtctacgtgttcgcgtattcctcccatctcggcgaggggacacttcatcaggtcgcaaagcggttgcgttccggcgagctggtgtgggaaagcctcgaaagcgctctgtcgcgctggaacgtgatcagccagattccggtggatagggtcacgttcatgaccacgggtcgcgaaggcgagttccataccccgtatggggtgatcgagttcacgcactgcaagctcagctgggaccgcatcctgccgaacctgatcgcccgcgatgacggactgacgccgctcgcgtcgaaacagtgggcgtatcgtgacctgaaggccgtcgggcgtaatctcgatctggtggatatggatgaattggaggacgacgatgactggaactgacgaaccgttcaagtacaaagccatggcagcacagatcgtttccgccgagggcatgggcaatctgcttcccgtggtcgagaaggaacttctgcattatcgaatcctggacgccatgatgcgcgagggtttcttctcctcgctggtgttccagggcggcacgagtctgcgcctgtgccacgggtccccgaggtacagcgaggaccttgattttgccggcggcacctcgttcgacatggacacccttaaagggcttggctcctgcatctccgattcgctctcggggatgggcgatgatgtgacggtccgggtcaaggagccgagacccgacgccgatgggctgacgcgcagatggcgtatagcgattcgcacggccggtcagcgcaaggatctgccgagccagacaatcaagctggaggtggcatcgattcccgcgtacgagccgcagcatcgtcccgccttggtcaactatccgatgttcccggccttgtcgggtcagatcatcctcgatgtggaaagccccaccgagattcttgccgacaagctgctctcctatgcctgcgcatcgcacctgcggcgacgcgacctgtgggacatgtgctggttggcgtcgagaggcgacgtcgattcccgacgggcgatggagcttgcggaattgaaatcatctgattacggcgaagaaggactttgggcagaccgtgctgatcgcgtggcgggggtcgccgatgtgatcggctcggatgccttcgccgacgagatgcgccggttcctccccgccggcctgatgacatccacggtcgaatccccacgttggagcgcatgggcgatcgaacagatcgggacgttgtacggcactccaggcactccatcgtcggccgatgcggttcccggattccctattttcggtgcgtcgaacgactccagtccaacccgctgaacgctaaggaggtctgcgatgtcgaatctggactataagttgcctgagccgacaaaggcgcaattggagtacgtgcgttaccttagtcgtttccaagcgccgcgtgaacgccggactcttttcgcccgcaccgaatcggatatcgcagccgccttccgtgaagagaccgcgaaccattcctggaacgccgacgaccttgcctcccaggccggtatcggtccccggcttgccgatgctctgctccagcggggcgaagccccgattgaagcggtgttctccgcagccgatgcgctggggatagacatagccgcgttgccgctttccagtctcgggaacactcggtgagcggtgttggtatgcgccaatatgcgcaaagaagcatgttggcgtataccgtttgttcatccgatcctcgcggtgctaagggaataggtggcgacgctgccggctgttccgacgacctggttcatgggcatggtcagtctcatgtcggtgcgggtggtggattccacggcgttacgcatttcgtcctgcacgaggccgatgtagcgcatggtggtggcgatgttggcgtgccccagcatacggctgacaagcacgatgttgcagccgttcctgtagtagacgcatgtggcgaacctgcggcgcaggctgtgcgacgggtatccggttgccgtcttgatcctcttcgccacgtaatcgacgccgcagtgtccctgcacgtctccggggaacagccacacgccggtgcgtttcctcaatgtcgccgcaagtcttgccggcacgggaaggattcgctctttgttgcccttgccgtggacgtgaagcaccatgccctcggcgttctcctccagatcggtcttcaggttgattctggtcatttcgatgcggcgcaggccgcagaacgcgcccagcatgacggccagccgcgcgttctcgtcgggtgatgcgagtccttgttcgatgttctcctcgggacagatgcagccggacggaagggtcatgggcacggtgggcacttcgtccgccggattgcggcgggcgagccctcgcttcatgctccattggtagaagaccttgacgcagctgcgcactccgcgtctgccttcggttcccatgccggctaggtagaatatgaggtcgtcttcggtcacgtcggtgatgcttttatcgacggctttggagaatcgaacgatctggtaccagcgggtgcgcagggtgtcgttcgtgcgtccgatggcgtccatccagtcgatccatttctcgatggattctttccaatcctcccgtggctcgacgtgttcgcagctcttcctgttgtcgttccaatacctcatggggctccttaagcgcatagaaaagggaagtgacttcttcatcacttcccaaggaatactattgcgcgtttctggccgatgctcttcggaaaaccagctgcaaggtgaacatgcgcgatgacacgccgatttgaaggaacagcaaggctggtgtattgtctactcctgttgcaaaaagccctacggctgcgagccagaaccgtatatcggacggtcactggttcaagcccagtcgcaggagcgcgtttttaggtttttcctgattttcgtcggggagaagcttagaacaggagaatattcctgcgtagctcagttggcagagcatccgactgttaatcggacggtcactggttcaagcccagtcgcaggagccacatgaaagcccttggaaatcaagggctttttgttactctaacgaatcaagcacgtcgtcgatcagcgtgcgctcgtgcggtccatcggtcttgagccgaggaaagcgccgcaacgcgttggcgggacttgccccggccgcgcgcgccacattcgatttcgactcgccgtgcgccaaagccgtttccgcaagacggtccaccagcgagtccgacaccttgcggatctgctcggcaacccacaactgcgccagttcgggggagagcgcgtaatcgtcctgcaattcgcttgacgcttcctgcacggccgcccacagcaccataaaaggcttctgatagtaggtgatccgatcgtaatcggactcgctttccagttgctgcaacgctttgcgctgtgacgtgttatcgctcatacgttccatcgtatgccgagacacgcccggagcctgtggataactcatcctccgaccacagggccgtttcagctggacaagcacaacttcacactgtcatgctggcgatttaccacagcacaacgcaacggcgcaaacacagcaacgtgaaggagccatcatggacgaacgtgaatatcgcaggcgaatccgacggaacagaatcgcacaggaggaaaagaagcgcatccgccagcagttgcgccaaaccatggtcgtatgcgctctggcatgtgtcatgctgctcgtgtgctgcctatggtcggccgaaccgacgtatgcgaaaacgaatgcggtgaccgcgtccggttcctgcgccgtcctgatgcgatggccgctgaacggcgcgcaggtggtcggcaagtacgatgcgccgaaacaacagtggcttccaggccatcggggtgtcgacctgcttgcggaccctcaggaagccatcgtcgcgcccgcggacggcgtgatcgccttcagcggcaacgtgggaggcaaagccgtggtcaccatccggcatggaggcgacctttccggcctgacctcgacgttcgaacccgccattgcggaacgcgatgtcggcgcacatgttgcgcaaggggagcgtttcgcgcgtgtggagggcgaatccgaccattgcgacgagcggtgcctgcattgggggataaaatcggaaggacggcaatacaccaatccggaaagcaaaacccgtacggtgagaatcggattgaaaggcctgtgaaacaggggtcgacagaaccattgattttgtccatacgtcgtggcctcgtcgaaaaaagtgaagctctcaggctatgatgctacatgtacgacgattacgcaggggagaaatgccatgtacaaggaatacacgcggcctttggaacagcagatcgacacggataagaacattttctcggtgcttgatgaacgagcgaaccgcactccgaacgattcattggtcgaatacaagaacgagcatggcgagtggtcgtcgttcagcgccaccgaattccgtgccaaggtcatcgccatcgccaaaggcctgatcgcccaaggcatcatgcccggcgaatcggtgtccatcatctctcacacctgctggcagtggactgcgctcgacgtggccatcatgtcgatcggagcgctcaccgttcccgtatacgagacgaattctcccgcgcaggtcaaaatgatcttcaacgacgccaacgtcaaaatggcgttcgcagaagatgacgcgcaacgcgacaagatcgaatccatcagaaacgaatgctccaatcttggcgacgtctacgtcatcggacttggcgcgatcgacacgatgatcgaatacggacatgccgtgtccgacgccgaattccaagagcgcgaacatgcggtcaaaggatcggacctcgccaccatcgtgtacacctccggctccacaggcacgccaaaaggcattgagctcacccattccaatttcgtgttcatcacctattcgggcattagctccatgcccgatatcgcgatgaagccgaaccgtcgtctgctgctgttccttccactggcgcacgtgttcgcacgctacatgcagttcttctgcttcgcaggtaacgtctcgctcggcctatccagcaacttgaagacgatcctggctgatttcaaagcgttcaagccgacgttcatccttgccgtgccgcgtatcttcgaaaagatatacaatgcggcgtcgcaaaaggccggagccggcctcaaaggacgtattttcgcaggtgccacgcagacggcgcgcgactggtcgtacgcacagcagtcaggcgaaggcattccggttgtcttgaatctcaagcatgcgctgtacaacaagctggtgtactcctcgatcatggacgtgttcggcggccatgtggaatacgcggtttccggaggcgctccgcttgattcatccatcgcgcattttttcaatggcgtcggactgccgctgctggaaggctacggcatgaccgaaacctgcgctccgtcaagcgtcaatccgacctccggatacaagattggcaccatcggactgcctctgcagggcgtggccatgggtgtcgacgaggaaggtgaactgtgcatcaagagcccggccgtatgcgccggctaccacaacaatcccgacgtcaccaggcagcagattgtcgacggctggctgcataccggtgatcttggttccatcgacgacgaaggcttcgtctccatcgtcggacgtaagaaggacctcatcatcaccgccggcggcaagaacgtctctccatgcgaaatggaagcgtcgatcatgacgtcgcccgtggtgagtcaatgcgtgatgatcggcgaccgcaagccgttcatagcggccatcattgcgttggatcttggcgaaacgaacgcatggcttgcatcgaaaggcgcggaatgcgcggcatccctcgaggaggcctcccgcaatccgatcgtgcgcgccgaagtggaacgtgccgtcaacaaagccaacgagctcgcatcccgtgccgaatcgatccgtaagttcgaaatcgtgccggacgagttcaccgaagaaaacggcttggtcacgccgagcatgaaggcacgccgtcaggcggtggttgatcactaccgcatgctgatcgacaccgtcatctacgttccgaagaagtagaatgcgatgatcggcggtaggaatgtgccggccgcaacataaaaagctggcttccgtcgcggcggttcgacggaagccagctttttccatctcttgtcggatttcctatgtctgataatccggattaccttgttgccggtctacaagcctgcttcggcgagcgagatatatcccggttcgatcagcgttttcttcagattgctggcgctgaccgcaagcgcctcttcctgaatggtcggcactttcatgtcttccatggcgacggatgagatgaacgtcagcttcgcaagtttgcccgacgtgttgagctgcacgcaggtctgtgcgatgtcggatgctaaggtcttgcgattttccaaagcggtcatccactgtttgccgttcacgatattcggtatggagctgacgtaggcgccgtaaccggtgatgatcggccattgcgagttctgctcgtcaagggaatcgctggtatcctccgtatcggaatcgccgtcatcggattcaggcgcctgcgcaggatcgggaacggactgttttttcaggtctttcttgccggtgatattgtctacgatgccggaaatggtgatggatgggttgatgtcggccgccgaaccggtatatccaagatcgttgagctcttcggaagcatagccggccacataatcattgcaggagatgatgccgtcgatgcgggtatggcgcgatgtgtccttatccatgccgagacgtccggcgagcgtggatttgacccgctcacttttcgccgcgtcgaacgccacggacacccaatcggattccgtgctcgacgaggtcagcgtgccggatggggaaacggccttcccatctttgaaatacggtccaagcactgaccaaatgcctttgaacacgccttgcgcgaaagtcgcgtccgctgtgctgccgctttcattggcggcatcgtaggggagtagcacttcgatatgcttcggattgtcggagctggttttgtcgagctcgagcttgctgaccagctgtttggcttgaagctggccgatctgctcggccgtggtcatcggcacgtacacatccggagtgaaaccctgcagcgtgttcgacactaacacgactttcatgccctcgttttgagcgagctgcaatgcggaaaccaaacgttccgcggattgggcgtagtcctgggcgtcttcgtcggaggagctcccattccatgtgatggcgtgcgacacatagtctccatattggcggtcggattcggtggtgtcggccaccggcgccactaccagagtggttttgtcggaggaatccgcatcgtcgctggtgctgttgacatgattcaccacgtaatcctgcacactttggctttgcttgtcgagacttggcgccgctttgacggtgatgttggcgcctttgacatcattgtctttcaatgatgaaacgatttccggcaccagcttctcccatttgctcagaggcgtctgctgggagatggtgatgccgtccgaaggggtgaagatcaccacgttgccggcatcggtggcagtggcggtgctgggggagtccgtttcatgcgattgcgtttcattggcggatgagcaggcgcccatggtcatgatgagcgaggtcgatgccaacagtgcgaacagacgtttcgtcacggtcgtgcggtgcagtgtcatgccgtttccttcatgaaaatcgaatgatgattcctatgctgagctccgattgtaatatccggacgtcaaaaagggctggatatgcgtgtgaaccatacatatccagcccttttgagcctgctgctggccgttcagccaaaggttattcggctaggttattcggctaggtcattcggccagagccttggcgagattctcgtccaaagcgttcatgaagccttcggtgtcaagccaggcctgatccggaccaacgagcatggcgagatccttggtcatctgaccgccttcaacggtagacacgatgaccttctccaaagtttcggcgaaatacttgacttccggagtgttatccaagtcggcgcggtgcttgagaccgccggtccaagcgaaaatcgatgcgatcggattggtggaggtcttctctcccttctgccagcggcggtagtggcgggtcacagtgccgtgtgcggcctcggcctcgacggtctggccgtcaggggtcatgagcacggaggtcatgaggccgagagagccgaagccttgcgccacggaatcggactgcacgtcgccatcatagttcttgcaggcccaaatgtagccgccatgccacttgagggagctggccaccatgtcgtcgatcagacgatgctcataagtcaggcccgctgcggcgtacttgtctttgtattcgttttcgaacacttcggcgaacgtatccttgaactggccgtcgtatgccttgagaatcgtgttcttggtggaaagatacaccggatagccgcgcatcagaccatagttaaagcaggcgcgggcgaaaccacggatggaatcgttcacgttgtactgcacctgggccacgccgccgtcggcaccatagttgtacacgacatgttcgatcggctcggaaccatcttccggagtgaaggtgacggtgagcgtgcctgcccccggaaccttgaaatcagtggccttatactggtcgccgaacgcatggcgggctactacaatcggcttggtccagccgggaaccagacgcggaacgttgctcatcacgatcggctcgcggaaaatggttccgccgagaatattgcggatggtgccattgggggacttccacatcttcttcaggccgaattccttgacacgcgcctcatccggcgtgatggtggcgcactttacaccgacatgctcacgctggatggccttcgccgcgtcgacggtcacctgatcgtcggtggcatcgcggttttcgatgccgagatcgtaatattcgagatccacgtcgaggtatggaaggatcaggcgatccttgatatctttccagatgacgcgggtcatttcgtcgccgtcgagttcgacgaccttgccttcgaccttgattttggccatgtgttgccctcctgtcgggattgaaggtgataagttcctgtcttataacgaacgtgttaacggcacctgttaatgtccaaaaaacggtgtggcggcaggtgacacgctcttgcatactgtcattgctgagcattagccttgaaaacatgtctcaggaaattgaaatcggtttgggcaagaagggccgtctggcatactctctggacgacgtttccattgttccctcccgtcgtactcgcgatccgcaggatgtgtccatctcgtggcaggttgacgcttatgaattcgacgtgccggttatcggcgctccgatggattcggtgaccagcccggccaccgccatcgccatgggcaagatgggcgcgcttggcgtgctcgacctcgaaggcctgtggacccgctacgacgatccgcagccgctgcttgacgagatcgccgaactgccggccgaaagcgcgaccgagcgtattcagcagatctacgccgagccgatcaagccggagctcattgtcgagcgtctgcatgagattcgtgacgccggcgtcaccgttgcgggcgccctgtctccgcagcgcacgcaggactattattcgaccgtgctcgaagcgggcgtcgacctgttcgtcatccgcggcacggtcgtttccgccgagcacgtctcccaggatcacgagccattgaacctgaagaagttcatctacgatctggatgtgcccgtcatcgtaggcggcgccgccaactacaccgcggccctgcacttgatgcgtaccggcgcggccggcgtgctcgtcggcttcggcggcggcgcagtatccgcgaaccgcaacaccatcggtgttcacgctccgatggccaccgccatcgccgacgtggccgaagcccgccgcgactacatggacgagtccggcggccgttacgtccaagtgatcgccgacggcggcatgggcgactccggcagcttcatcaaggcgttcgcgcttggcgccgatgccgtgatgcttggctctccgctggcccgtgccgaggaagctccgggcaagggcatgcattggggtgccgaagcccgtcatcagacgcttccgcgcggcttccgcacgaacgtcggcaccgtcggcaccctggaagatatcatgttcggccccagccacaatgcggacggcaccaccaattacattggcgcgctccgtcgtgccatggcaaccaccggctatgtcgatctcaaaagcttccagcgttgcccggtcacggtcgctccgacccgctgaacgagctttgcggtaaagcctgaataacggttcattgatcctgtagcgtcatgctgcaggatctttttttgttatgtttccccggctaagaaagtcaggttggaatgattaagctatacatcgcaaatgaaagagcagaggtgagatgaatggcagcgcatagaagtggcgattcccgacgtttggacccgttgtccggacgattcacggattacatcgtgatcgatacggaaacaaccggattgagtgtgcgcaaaggtgccaagctcattgagatcggcgcggtcaaaatccgtaatgatgagctggttgacgaattcgaccagctcatcaacccgttcgaacacgtcccgtcaagaatcactggtttgacgggaatcgacgatggcatgctgctcggcaaaccggatgtgcgtgaagtcatggatgagtttgcacgctggtgttcggacacagccgtggtcatggcgcacaatgcgtccttcgacatgtcgttcctcgacaatgctgtacagctcgcttactcggagcgagacgcgcgctttgcgcaccatttcgtcgacactctggacctcagccgtcgactgcatccggaaaaacgaagccacaaagtttccaccctcatcgtcgactaccacatcgccgacatggaggagcaccgcgcattgtccgacgccaggcaggagtggatgctgtaccgcgccatgcgtgacgaggccgagctgctcggcatgctctgacagcctaacgtcgttcgaacacttcgatccggtattctcccacaggtgtctgttgatttgtggatggattatttgttcggcttcgtgccgcagcaggcgtcatctccactggcggagaacattgcattgggtgcgaagttcagagcgaaaccgctctgttggtgggagacgttggctgaatcggatttggcgtcattcgtgatatttgccctctgtgagggctccgttccggcaacgaacgaggcgatatctcctggaacgcctgcgctacgtaactgacgcacggtgactggaatcgtgccgatgctgctttccgaggtgaacgcgaccactccggcagggaagaacgctttgaagaagtggattggattcaacttcgtcagtgttaagcagcaggaagaatacggttttcgcaccaatactctttaagcgcatggactctccaaggttcgtgatgctggagatgatgctgaacagcagcagcggaaccaccagtgcggtaattgcgttggaccagatggaacccaccgcgccgacataatcagtgtggccgttgaaagcgattcccaaaatgataccgaatgccgttgcaagcaacacgcgtgtggtgaaacccgcgtttttcttacgtttgagaaacgccaggatgacgaacaggatcgcggctacgccgagggcgatccaatcatatgcgatgtctgacattactatcattcccttcccaaaaaatggtgatacattacgtgagatacccccacgttcatgtcggacatcaatctatccgctccgtctccggcgcaacgccttgtagttattgctgttttccatagtcgtctatcagacggtagtcattccgaggcacgcatgctgacattccagcgctccacaagtcattccgagacgtggttgttttgcgtttagggagggctcgttttaagatggaacgtcggataactggcttcgtgtctggatttgtgagagccggaggaattggagattagacatggcattaagtgccgcgattattcttgcggcgggtgagggcacccgcatgcgttccaacaagccgaaagtgctgcacactttggccggaaagacgtttttgaaccgtgtgatggactccgtgtcggcgctcgaccctgaaacgttggccgtggtcgtgcactgccaggcggaacgagtcgccgaagcggcccgctcctacaatgagcgtgtcaccatcgtcaatcaggacgacattcccggcaccgggcgagccgtgcagtgcgccatgacgcagttgaaggagcaaggcggtcttgacggctcggtgctgatcgcagcttcggatatgccgctgctcgacgccgacacgttgaaccagctgcttgccttccatgagcaaagcggcaacggagccaccgtgctcaccaccattcttgacgatcctactggctatggtcgcatcatccgcgacagcaaaggcaacgtgctgcgcatcgtggaacagaaggacgccaacagcagcgaactggccgtgcatgaagtgaacacgtccgtctacgtgttcgatgccaaactgctggctgaagcgatcgccaacctcaaatccaacaacgcccaaggcgagttctacctgaccgacgcactcgaaaccgccaaagccaacggtgccgtcggtgcgttcgccgcccccgacccgttgagcgtcgaaggtgtcaacgaccgcgtgcagctcgcagcgctcgccaaagctcacaacaagcgtatctgcgagcattggatgcgtaagggcgtgaccattctcgactctgaaaccacgtggatcgaagatgacgtgcgtatcgaacgcgatgcggtgatccttcccggatgcttcctggaaggccagactgtgatcggcgagggcgcgcaggtcggcccatacacaacacttatcagcgcggtcatcgatgccgacgcccatgtggagcgttcccgcgtgcaggaaacccacatcggtcgcgcggccaacatcggtccgtggacgtacctgcgtccgggcaacgatcttggcgaggagtccaaggccggcgcctttgtggaaatgaagaaggcgcacatcggcaacggcaccaaggtgccgcatctgagctatgttggcgacgccgacttgggtgagcacaccaatatcggcggcggtaccatcaccgccaactatgatggcgtgcacaagcaccacaccaccatcggatcgaacgtgcacgtcggtgccggcaacctgttcgtggcccctgtcgaagtcggcagcggcgtcactaccggagccggttccgtggtacgccacgacgttccggacgattccatggtctattccgaaaacacacaacatgtagtagagggctggaagcccgaatgggagcgctgaatatgccggcagtacaagattccatcgacgccatccgcatcgccgccgccgcggccgaccgtatgaaggccaccgaccttgttgccttcgacgtcaccgaaccattggccattaccgacgcgatgctcgtcgccaccgcttcgaacgaacgtcaggtgttggcggttgccgaagagatcgaaaaggacctgtatctcaaaagcggcaagcgtcaaccgcgttcccgcgaaggcttgaccgaaggccagtgggtgctgctcgactatggtgatttcgtgatccacgtcatgcatcaggagtcccgcgacttctatcgcctcgaacgcttgtggaaggattgcccgagcatcgacctgcagctcgaacatccggagacttccgacgaagagaccgcggaaatcgcggaataacacgtatgaacatgccttcccgtatagatgcggaaggcatgttttcatatcaagcgaagcagttttcgcaaacattccataatcgagaaagcaacggagagcagcagcatgcctcgaaacgtcgaacttgagcataacagcgcagtaccggaacacgtgcacgccatcacgctggtgcgtcacggacgtaccgcctacaatgcgcagcatcgtctgcaaggccagatcgacattcccctcgacgaagtcggacaatggcaggttcgccagacggccgacgcattgcgtgaactgtatgttgatcgtcgtcccgatattccgaaccggctggtcatctgttccgatctggggcgtgccgcagccaccgcgcatgcgttcgccgacccgctgggcttggaagtgcatcccgacatccgcgtgcgtgaacgcagcttcggcgattgggaaggcattccggttgaggaactcgcgcaacggtacccggaagactatcgttcctgggctgaattccgtggcggcgaactcaaatacggtgccgaacccaaggaggaagtcggacgtcgtggcgtcgaagcgttgaacgattgggcgttccgtgccggatccgacacggacttgtacgtgttctcgcatggtgcatggatttctcaaacgttgcagacgctgctgggaatggcggatgtgcatggcgatttcgccgacattttgtcgatgcgcaacgctcactgggtgcggctcattccattggagatcggttccacattgcgttggcgtttgatggactacaatcacggtcccgctatcgccgattccgaggaatgggagcatcccagcctgtagccagcctgtagccggccgatacatgatgtcggacgctggtctgtcaccgctttttcaagcttttcacagaatcgccagtactttcatagcgaaattagctatcgtcatggcttgtgaaaaacttttttaagggaatctctttttcgtcgatttgcgcgggtgcgctggcggcggtcacgtcattcctactttccgcgaaaatcggtatcgcgggatcggtgattggtgtggccgcgggttcggttgtttccgcggttgccacgcaggtctacaagaacgttttgaaggcatcaggggagaagatccaacaggccgtgccgttcccgtcgagtagcgagacggtttcgaatgagcgagctgcggatgaaacgcaggtgcttggctcttccgaacaggatgatgagacgaggattattggatcgtctcctgttgcgtcggatgtcacgatggtattgtctgccgatacggctgcggtagcgcagtccggtttaccgcgcgtcatttcctccggacaggaatatgcggatgcgactcgtgcgctcggcgatattgccggggcaggggagacttccgttttcccgaacggacagcgtggcgtcagcgatgttggcgtagttaccggtaagaccggaacactcggaagcgcgcatgatgcccgagtacagcatgctgggcagcgttcctcgaattggttgcatagcaagtacgctccggcgatcatcgcattcgtcagtgctttggttggtgtgggagtgagcgcgggattgattcttgctttcaccggcggtcaggggacggacaccgtggtgcgtgacgtggtgcatgagaaggttgtaccttcgcatggaaataccgatgactatcagactggcgacgggcagacccccgtgcaaaagcctaaatccgattccacggattcgaacgacgaaaccaccacggacggcagcgacaaaaccaccaacggatccaccgactcgtccacttccaacggcacatcgagcaataccaatggatccacgtccggaaacagcgggtcgtcatccgataattccagcaatggttccagccagaacggaacggattcgtccaacggcactggctcaaacggaggcacgtctggcaccactggtgatggctcatcatccggatccggaaacagcggaaccgatggttcgactggcactggcacgtcgggatccaccgacggtactaccggctcgacgggagatgcaagtagtaactaatgtcgctggtggcgcacttcccatgtcgcccgcataaggttcacataaggtgattgcgtagtgcggttttactcatgccaattcctcagtgcgggcgacacgccgaaatttgcgtgacttatgtctgcgatgtatattatacagagtttgcagggcagactttggggctatggcgcagctggtagcgcatctccatggcatggagagggtcaggggttcgaatccccttagctccacgattatcgagggccactccgtaagggatggccctttttgttgaaacgacgctgtttcgcggacgtgcttgccgaacctcaaaaacggttcaaggtgatagaaaccggttataaggtggtaaagaaacaggacttccacgacgacgcggagaaccttcggcaagatcgtatacaagccgaacagacggacgcatgaacgacccgtgtcggcaggggtgtcggcgacggacggtagagccgacatgggcttattgttaattttcattcatagatgctttgtcttgtcttatgagtgcttctaatttataatcctcataaaatataaatgactttttgaaagcagtgaccgttatgagcatggaatacaggactttggcgcggctgttccacgccgacaggagcatggactcctacgccaaccacgaccggctcgtcagacaacgcctcgaagcggactccacattcacaaccggaatcggcacacccttgggcgaactgttcatcgccacgccgcgctgcgtgtgcatgctcacacagaaggtgctcctcgccgaacgccgggtatcggccatgtggcggagcatcccaggggtcatgcggtggaactacatctaccacgccatatccgaggaattgctcgccaccaacgagatggagggggtcaggtcgacgcggaaggagacggaagccgccgtggccgcagcccggcaggccaggaccgagggcgacatggagaaggccaggttcggcgagttcgcgaaactgtatctcaacctcaccaatcgcgacgttgaactgcccaagactctcgaggacatcagggacatctacgacaagatagccctcgacgagatcgacgacaagaacagacccgacggggagctgttcaggaaaggcgatgtcgaggcccaaggaccgcacggcaccgtcatccacagcggcgtcagcagcgaggcgcggatatcagcgctgctcgcacagatgatggacctcgcccggtcggataccataccgttcctgcagcgggcgatagccagccacttcctgttcgaatacatccacccgttctacgacggcaacggcaggacaggcaggtatctgctcgcgctctacctcagcaacgatctcactctgcccaccgtgctgtccctctccaggacgatcgcggagaacaagaacgaatactacaaggcgttcactgaggccgaggacaaactcaacagcggggaactcacgttcttcgtatacaccatcctcggactcatcgaacgggcgcaggaatccctgatcgaggagctcggcgtcaaaatcgaccagctcgacaaggcgaccgtcctgcgtgacgagctacggagggaacatgcactgtccacgaacgcgaccctgcttctctacgcagtcatgcaggaggagctgttcgacaccaccaagtccatgacgctcgaagatgcaggcggcgacctcatgctgacgaaacagacgatccgcaaatacgtggatgagctggcgggcgcgagcctcatcgagttcacaggaagacgccctctcagattcagggcctccggggcgttgcgtacgcgcatacaagcaaagcgagaatgggggatggaataaaatgcctttgtgctttctctggcagatactgtctgacatatctaagccagcaaacaagaattgccacatcgcaaaaagcccaggctaaatcggaaatgtctgaatctgcataaattcttttgagggaaaaacccatcaatggaataaaggaattcacacacaatatctaaaccaagtgcggatatcggcatgctgcaggctttgtctttgaacccattgcgaatcaactcgacgtgcatatcgtccagcagataccgctgatgccaacccaaaatcaatcctttcttttccatgattgattggatagcggatgatcgtggtctgatgcctcagcaaagtgcgaaacaggtgttatctctcctaaattcggtttcagatggagcgcgtatgtgatgttattcacgttgggcgaacatgcgttgtggggtttcttgtcgtagtctgaaagtatgcccgcattccatgggcatatagacgaaaggacggcatcatggtagatctcaccgatgagatgaagggattcctcaacagcaacctcgcatgggtggccaccatcagcaaagaaggccaggtcgatctcggtccgaagatgagcatgttcatcatcgacaacaaccatatcggctaccacgagcgcaccgcgggccagacataccgtaacctgcttgacggcagtgatctggtcgtcgcggtcgccaacctcgaacagaagaagggataccgtttccgcggcaacgtcgtgctgcattccgatgacgccatctatgacgaacaggtcaaagtcgccgaagaacgcggcacgaaaaagccgatgaccattccggttttggagatcacggaaattcaggatctcactccgggcgctacggcaggcaaaaccatcgtcaaggactgatcggttccatactgaaccagtcgaaacgacaatatcggagaaccgcagacgggactgtatgtccggtctgcggttcgctgttatcggaacggaagatcgcgaatctgcagcatatcgttcgcggcggttcgaccatggattcctatacggcagttgcatgtatgggttgtggataagtgtggataagtgttcgctcatccacttatccacagattttcttaaagaggtggcgggcgaatattggtttctgccatgctggtctgcacgcataagcgaagacgcctatgcgacaaccaacaaccaaagaaggtgaaccatgacacaacacaccatacgccgccgatggacctccatgcttgcgctgggcatgatcgcggctcttgccatgccgggcacggcccaagccacgccgcaactcggcgatttaggcgtcaagcagtccatgagcgtgaaggcaagcaacggggaaagcctcgaaggcaaggacctccgcgccatccagcttgccacatataccgccgcaagcgtggacggcaacacgatcgtcggctacgatctgaccacgaacacggcattggcatccgacatcaccgcggcagccaaagcggccggagccaccgatacgaaccttaccgtcaacggcaaaaacgatccgatggtgtgggtggtgaagaacctgaccgactcgcgcagcgatccatggagcggaaagctacgcaacttctgcaacagcctcgccaaacaaaccaacttcgccaagcaggatggaacggcggtttccacactcagccaagacaaagccaccatgtcgaccggcaacgtactcgtaccgggaatctacgccatcgtggaccgtacaccggcgacaaccacactaagcagcggcaccgccatcaaaacaaccgcgtccatcatgatgatgaacggcaccgcggtcaacggcgtcaaccaactacgtacggccggcggcacgaccctgaccctcgggcaagtgatctacaaggtatccaacgtggaatcgccagacaaaaaagtcaacgtcggcagtgcctggaaagacagcgcatccgaagcgataggcaaggacctgacctaccgtgtgacgcagaaaatccccaactggacaggctacgagcactactatcttgcgttgaacgatacgcttggcgcgggtctcgactatggttcgctcacctcgatcaccgtcggcggcaaagcattggcgagcacgttctacaaggaaaacgtcaacggcaaaaccatcagctggctgttcggcgtcaacggagacattctcgcctcggacgcatcaaaggcggccctgccggtcggcgcgacgatcacagtcacctacaaggccagactcaacagcaatgcggtcatcggaagcccctgcaacgtcaactccatcgacttggaatactcccacaatcccaacgcatggcaggaccacaacaaccagcccggcaacgaggttaaagtctgcaccggtgaaatcgcattacgcaaggtcgacgccaaaagccaaaagctcaccggcgcgaaattcgccatcgcccaaggcgccagcgacaaaacgcctttgaaactcgtggccctcggcaacggcacctaccgcctcgccaccagcggcgataccaccacaaccaccacattcgaagccggcgaaaccaaaatccaaggactcaaaggcgaatacaccatcaccgaaacacaagcgccccaggactactcgtcgctcatgctgcccagcgcagtcgtcaccgtcaacgttgacgacaccaacatgacgtggagcctcgacgtcaaatccgaccccaacaacctcatcaaaaaaggcgacagccacaccgtggtcgtcaccaacatccgtaccatcaacgaaataccgttgactggtgcggcaggcctcaccatgctcttcagcatcgcggcactcctcttcataggaggcatcgtcatgctgcgcatgtgccgatcaagcaacgactagccaacatccgacaataggcaacacatggcgattcccccgcatagcaaaccacggcacaaaaaagcgcccaacaaacgcagcatcatccgatggtgcgtgggaaccgccatgctcaccgcaacggcactcatcatcagcatcaccctgatcatgcgcgccgaagacaacatccaacaagcagccaacgtcaaagcgtacgcagccaccatcaccaacaccgcaaacaaggcaatccaagaaagcaaacggcaggcgaaactctacaacgcgcgcctcgcaaaccaaaccagcaaccaaacagacgacgaacccgcaacgcaaaatcccgacgaatacaatcggcaactcgtcatcccacccagcgacgtcatggcaaccatcaactacccgaaactcggcatcagcctacccatacgccacggaacaagcgaacagacgctcgccatcggcgcagggcattgggaaggcacatccctgccaatcgggggagcgggaacccataccgtcatcaccgcacaccggggcctcgccgacaaactcatgttcaccaaactcgaccaagcccgagaaggtgacgaattcaccatcaccaccctcggcgaaaccctcacctatcaagtgcaaacaatccgcaccatcacccccgacgatttcacctggataaacaaacacgacgccagcgccgatcaggccacccttatgacctgcaccccatacggcatcaacacccaccggcttctcatcacaggaacgcgcgtccccaaccacgacgaatgcccgccagaaacaggatgcctcaccgacggaaccctctccaccacggcattcgcgctcacagccatctgggcgaccctcaccacactcgcacggcatagctacaatgaaatgcatgatcgacgaagtactcttcctgcgccatggacgcaccgcatacaatctcgcaagacgactgcaaggccaaatcgacattcccctcaacatcgtcggcaggtggcaggccgaccaaagcgcttatgaactcgccaaaacatactattgggcgaaagtcgcgcacatcgccgaccataatgatgaactcgcccaacccgcgtacgagggcgcgtatctcgccgatcttaacgaaatcaacgaggcaccggccgtgagccgacgcatggtcgtcgtatcatccgaccttttccgcgcccaacagaccgctcacgccatcgccgaccttctcggacttgacgtagccctcgacccacgcctgcgcgaacgcagcttcggcgaatgggaaggcatgacccgcgaggaaatcctcgaacagtacgccgacgactaccattcatggcgtgcccacaccggaggcgaaaccaagcatggcgtcgaaagccgcaggcataccggccagcgtggctcccaagccatacgaagcattatcgccgaacatgccgatgatccgacggccaccacgctgctcgcagtcggccatggatcgtggatcgtggccaccgtcgccgtgctgctcgacatggatccggacgacctcaacaatctcggagccatgcgcaacgccttctggacgagcatgagcgtcaacacaggcggttccaacggtcctgcggatcccgacacatggcagtggaagctcgacgccttcaaccaaggtcccgccatcgccgcgcttaccgattgggagaatgggccgaaggaattgcgaggccccaacatgccattgtggaagcccatcgtgcagtgatccgcagtaaccgcaacgatctgcagtgactgtcgcctgccgcggacgcatgcgtcgaacatgaattctcgatgaaatctcaggcacgcggccggccaactctcaaggtgggactatcctaaataaggttgtttgcccgaatgttccagatcgatcgcaagagaccgatcgccggagatgttggattcgggctgccgtacagcgatagaacgtcggaaagcgcgaaaggcgggtgagagacatgttgagaatgttcagaacgattaacggccaggtggagcagatccaaaaacccgaaaacggatcttggttatgcctttcggatccgacggatgtggaactcgccaacgtttccatggaaaccggcgttgatctcgccgacctgcgcgccccgcttgatgacgaagaacgctcccgcgtggacgtggaagacgattacacgatgatcatcgtcgacattccaaccgtcgaagagcgcggcgggcgagactggtacgagaccatcccgttgtcgatcatcatcacgcagtcggccatcatcaccgtctgcatgcaggacactccggtgttgcacccgttcatggaaggtacgatccgcggtttcaacacgtatatgaaaacgcgtttcatcctgcagatcctgtaccgcaacgccaccatgtatctgcggtatctgcgtatcatcgaccgcgaaagcgacaagctcgaactcaaactgcgccattccatgcagaatcgtgagattctcatgctgctcgaactgagcaaaacgttggtctacttcaccacgtcgctcaaatcgaacgaaatcgtgatggaaaagctgaccacgctgccgcgcatcaagcagtatccggaagacgaggatctgctcgacgacgtcatcaccgaaaacaagcaggcaatcgagatggccaacatctacagcggcgttcttgccaacatgaccgacgcgttcgcgtcgatcgtgtcgaacaatctgaacaacgtgatgcgcatcttcacgatcatctccatcacgctgtcgattccgacattgatcttctcaatgtacggcatgaacttccaggagggcatgctaggcatgccgttgacggacaagccgtggggcttcgccgtgatcatcggaatctcgctggtcgtttcggccattgtcacctggttcctgacgcgttcgcgcatgttcaagtagaatcgcgtagaatcgcgcgtatgctacgtctgtcacgtctgtcacgaaatatcgcggcgctggtatgcgccgcttcgaccgtattgggcacgagcgcgtgcggcacttccatttccgtagtgaccaatggtctcgcgcaggggccgaccattgcgattggcgtggccgcggaccagcctggtttgggttttctgcatgggggagagtattcgggtttcgatatttccgtggcgcaatatgtggcgaacacgctgggattcgcgaaaaaacagatcgtgttcaaacaggtgctgccgtcgacgcgcgtttcgtcacttgaagacggcaccgtggacatggtggtcgatgctttcgccgctgatgacgttcaggatggtgaggttgagcttgcaggaccgtatctgactgtgcatgcggcattgttggtacgttccgacagtgcgggaaccatcaccggaaccgatgatcttgccggaaggacggtatgcgtggccaaaggaggaataccctcctacagcgtgcgaaatcttgcggaagatgtgaccgtgagcgaacgcgacacgtatccgcaatgcgaaacggcattgatgatcgggcaggcggacgccatcgcggcagatgacgccatagcggcgggcctcgcatccaacaggggaggcggatatctcaaggtcgtaggcgaaacgttcggcgaacgttcgtacgcgatcgcggtcaaatccggccaatccacgctggccaaacagatcgacgccgcattgcagtccatgatggacgacggctcgtggaagcaggccatagacaagatgaaacagtcgatcggctacgttcccgacatgtcgctcaaccctcccgcgataacgctctcggcagcgtcggaaggctgacggcccccgccttgcgtgacgctttgcaaaacgcttcttgcataatgattgacgccttgcgaagtgtccagttgcgcggctagtttcatgcattatgagtgacattgagaaaagcgcgcagacgcagtcgaacgaaccagccgaaccgtcgttccgttacaacgcggatttggctcagggcattgaggaaaaatggcagaagatttgggatgacgaaggcaccttctgggccgccaacgtcaatggcgatctgaaggacggcaagggtcgcaacgccgaaggacgcccgtcgtacttcgccatggatatgttcccgtacccgtcgggcaagggcctgcatgtgggccatccgctcggctacctcgccaccgatgtggtcagccgctaccaccgcatgaagggcgagaacgtgttgcacgccatgggctacgacgccttcggtctgccggctgagcaatatgcagtccagaccggccagcatccgcgcatcaccaccgagcagaacatcgccaacatgcgccgccagctgcatcgtatgggcctgagcttcgacaaccgccgctccttcgccactattgacccgggctatgtgcgttggacccagtggatcttctcccgcatctacgattcctggtacgacgaggatgccaccaacccgtctggctccaagggctgcgcacgcccgatcagcacgctggtggagcagttcgaatccggcgagcgtgagattccgggattcgcaggcaagcagtggaatgatctgaccgaagccgagcaggccgacgtgctcaacgacttccgactggcatacatctccaagtctccggtgaactggtgcccgggcctgggcacggtgctcgccaacgaggaggtcaccgccgaaggcaagtccgaacgcggtaacttcccggtgttccagcgtgagctgcgccagtggtccatgcgcatcaccgcatacggccaccgtctgatcgaagatcttgacggcatcgactggccggaaaaggtcaagctcatgcagcgcaactggatcggcgaatcccacggcgcttccgtgcatttcgacgtcgaaaccccgaacggcgtcaaggacatggagatctacaccacccgtcccgataccctgttcggcaccacgttcgccgtggtctccccggagcatcatctgctcgaggatgttcccgccgaatggccgtccgagactccggaagactggaagggcggctacgccactccggtcgaggctgtgaaggcctaccgtatggccgcggaatccaagaccgccaaggaccgtgtggacgaggcgggcgagaagaccggcctgttcaccggcctgtacgtcatcaacccgatcaccggagccaagctgccgctgttcaccgcagactatgtgcttatggattacggcaccggcgccatcatggccgtgccgggtggcgaccagcgtgattacgatttcgcggtcaagttcggtctgccggtcacctacaccgtgcagccgctgccggaatccggcgacgatctggccaactatgagggcaaggctccgttcgtctcccacgacggcatcgtcatcaactccgctgtggacgccacccgtgccaagggcgacgcgttgagcctcaatggactgcgcgtggacgaagccatcgacaaggtgaacgcatggctggaagaagctggtgtcggcaagggcacggtcagctaccgtctgcgcgactggctgttcagccgccagcgttactggggcgagccgttcccgatcgtctacggcgaagatggcaccccgcatctgttgccggacgaccagctgccgatcaacctgccggacgtgccggactacagcccgaagactttcgatccggaagacgccgaatccaatcctgaagcgccgctgagccgcaacgaggattgggtgaaggtcgaactcgacttgggcgacggcaagaagacctactaccgcgacaccaacaccatgccgaactgggccggatcctgctggtactacatgcgctacctcgacccgaccgacaccgaacacatggtggagaagagcgagttcgactactggatgggcccgaaccacaacgagaccactggcaagtccggcggcgtggacctgtacatcggtggcgtggagcacgccgtgctgcacttgctgtactcccgcttctggcacaaggtgctcttcgacctcggcttcgtggattccgcggaaccgttccacaagctgttcaaccagggcatgatccaggcatacgcctacaccgacgaccgtggccagtacgtgccggccgccgaagtggtggaaggcccggccgacgccaacggagagccgaccttcacctggaacggagagcacgccaaccgcgagtttggcaagatgggcaagagcctgaagaacatcatcacgccggacgacatgtatgcgaactacggcgcggacaccttccgcctgtatgagatgggcatgggcccgctggccgaatcccgtccgtggaacacgcgcaacgtggtcggatccatgcgcttcctgcagcgcctgtggcgcaacgtcgtcgacgagaacaccggcgaagtgcgcgtcaccgatggtaagctcgacacgaagacgctgaagctgctgaacaacacgatcgccgacgtgaccgtggaaatggaagcgatgcgtcctaacacggccatcgccaagctcatcgtgctcaacaaccatctgaccagcctcaacgaagtgccgcgcgcggccgtcgaaccgttgattctgatgctttccccgatcgctccgcacatctgcgaggaactgtggaacaagctcggacacggcgaatcgttggcccacgccgaatggccgaaggccgacgaacgctatgtcggccaggacgccgtcaccgcggtcgtgcagatcaagggcaaggtgcgcgccaagctcgaggtctcgcccgacatcgatcctaaggaacttgagaagatggcgttggaagccgtcgccgatcgtctgggcggcaaggaaccgcgcaaggtcatcgtcaaggctccgaagatcgtgtccatcgttcctgcggaatgatatttcgaaaaacggatccaacggcttctggcgagacctttgacgaggcttccaacagggtgggaaccgtttccgcataaggcgacacgccgaacatgtggataactcccatccttcgaccacaggggccgtttcgactggacaacatgcccatgcatcctccattttggatgcatgggcattatcgttaccccgccgggcaggcgcaacaggcaagccgaaaccgcatcgcagtctgcgcaacggctgcgcggacttggcatgcccgaaacacgtggaaagaacgcgcgcgggcagaacgttcgcaacgaacatgctgttcccgcgatatccgaaacaacctcaatatccgagatttccgcagcggctgaaacgtccactgcaatcgcgacaactgaacaatcgcctgaacccgcaaaacccacattgcgggatctggccggcgtcaagccttccgacaaaccgactgaacaggaccggcccaaacgcgaccgtccacgactcgtcttccaaccaatccacgcggtcatcgccatactcaccctgtcgtgcgcgctctgcgcaagcctgaccatgctcatccaacaggccgtccactacagtgcgctccaacaatcgcagatcacccaatccgaacaatcgaaggcgaacggaaccgagaaagacaagacggcgtccacgcaaacaacaccaagccagcagccatccacggaacccgacagccagagcgaaccaacatccggaccagcggagcccgccgatccggctgacggtctgctgaacatcaacaccgcaggatccgacgaactgcagaccttgaaaggcgtcggtcccgtgaccgcgcaacgcatcatcgactatcgcaatcagatcggccgtttcaacaatgtcgaccaactgttggaagtcaaaggcatcggcgagaaaacgctggcgaaattccgagaccaagtgtgcgcacgatgagaggaaacacgttcgaatggcgggatggggagcaggggagcagggattggcgtctgctgccggccgccctatgcgggtgggcggcgagcttggccacgcatatgggattcgactattgcgtcgaacgggatggtcggttcggcatgctgccgctcgttgtggcattggcggtaccgttgctggcattattgggattattgggattgccgttcctgcgatcgcctatgctgcgagtgccggttggcgtgcggcgggcggtctcggcatggcatttcagcattatcgtatgcgtggtcgcggcgatggcatgcgcgtcttccgcgttgacctacgacgtattgcaatggagggatgcggcctcgtacgcggccagaaacggcgaaagcgacgttgtcacgctggtacgtacgacatctcccgcagtgaattcgaacagacgtgcaaacgattgccagattgatgcgacgatctcaacgatcacggcaagccaggtcacgcagccaagcatgatgcgggtgcgcgtctatgcggaccggccggactgtggcacgctcaaacaaggcggcgaataccggatgcggggcacgctcgccatatcgcaatacggtgccatgccgctatggctgacggacatcgcctccgtggaacgcatacggggaccgaacctcgcattgcgcacgatcggcatgatgcagcaggcgttcttcgaacagacgtcacggctttccgaccaagggaaagtgctcgttcccggcctgaccttaggtattcttgggcaggattacgttcctccagatagtggcaatggccagacgggcacgggtattgattccacatacgccaatctgcttgaaaatgccttccaacgttcgggcatactgcatctgatggcggtcagcggcgggcatcttgcggtcgtcgccaccctggtgcgcgccgtctgctcgttcctgctgctgcccaaacgcgtcacggccatcgccatcggcgcgtcgtacatcatgctggcgatgtgcgtgttcccatccgattcggtgtcgcgcgccctgctcatgggtttggcgggagcgggcttcctgttcctcggccgaagaacgcaagccctgtcaaccctcagctggaccacgttgggcatgctcatggtcaatccgcacatgtcacgcagtttcggattcgcattgtcatgcgccgccgtacttggcatcgtactgttcgcaggaccgttaggcgcatggctcacaccgatcatgccggcattcatcgcgcaaaccatggccatgaccatcgccgcgcaactcttcaccctgccgatccaagtgcttatcgaaccagaactgccggtctactccattccagccaatctggtcgtcgcacccttcgtgggattctccacacttgccggactcgccagtctcgccatctcatggatactgccaagcctcgggttcatattcgccagcctcgcctcatggggcaccgccatcatggaattcatggccctcaacctcggatcaggagaccacgccaccattccatggaccggagacgcaggcggcgcgctactgatcatcctcgtcgaaatcatcggatacacgaccgcacgattcgccggaacactcttcgcccgcatcaccacaacggaaccaaacctgccgggccgacgcctcatacacaatccgatcgaacgggcgaaagcatggggcgaacgaacctacaacgcgctcaaaaccatgaaatggaacgaatgaatcttgtccaccgatacagcgagattgaatactatgccgaaaccatccgcaacaacgcccttccacctcatctacggaggcgacccgtacctcaacgagcagaccgtacgcgacctgcgccaccaagcgcaacgcaaacaccccgacgcggaaaccatcgaactcgacgcaaccaacgccgatcattacgccttcgacgaagcggtaagcccatcactgctctccggacgatcaatcgtcatcgtatccaacctgcaaaacgccgacgacaaactcggcgaaaccatggtcgcctactgcaagcaagccgtcaacaatccagccgaagccagcatcgtcatctgccaacacgaaggcggcatcaaaggcaaacgactcatcgaccaactcaccaaagccggagccgtcaaagaaaccgtagccgacctcaaaaaagccgaagcgaaactcaacttcaccatacaatgcttcgaacgacgcaaccgacgcatcgaacccatggccgcacaacaactcgtggccgtactcggcgacaaaaccggcgaactcgcagccatggcaagacaactctgcttcgacttcgacgacaatcccataacattggaacgcgtcaaccaatacctcacagcaaatccccaagtagacggcttccgtgtcgccgacctcgcactctccggacgtgccgccgacgccatcatcgccatgcgcgcctcaatagaacaaggcaccgcgccaatcgcactcatcggagcgctcgccatgaaactacgcaccatggccaaagcctcagccgtacgctccggcaccatcagcgaagcggaagcgaaaaccaattcatgggtgctgaaaaacgccaccagacagctctccggatggacctccgacggcatgagacgatgcatccaaatgctcgcatgggccgacgaacaaagcaaaactaacggatcggaccctgtctacgcgctagaacgatccatcgaactgatcagcagcaaaggacgaaccaactaacatgagcgaggcaaccattactgacgccaacgaaaacaccagcgaaggcactgccaaaaccgtcaccgtcgaagcgacaaccggcgaagccatgcgcgaactcggcaaacaagtcgcacacctcacccacggcggagacgtcatactcctctcagggccactcggcgcaggaaaaaccaccttcgcacaaggcttcggcgcaggactcaacatcagcgaacccatcgtctcgccaaccttcaccatcgcacgcgaactcaaaggccaattccccagcggtaactccgcccacctcatacacgtcgacgcctaccgactcggcggcaacgcctacgccccaggccaaaatgccatcgaacgactactcgatgaactcgaatccctcggactcgacgaagaactcgaagaccccagcgacaacaccatcatcctcatggaatggggagaacagatggcagccgcgctcgcaccggaacgcctcgaaatccacatcgaccggccactcaacaccgttagcacagacgaaacaagcagagccgacaacgaactcaccagcaacggcacccgcaccgtaaccttcattcccgtcggcgcatcctggcaaaccttcgacatcacacgcaacaaccgctaaaacaccagcagcaagcacgattccagcatcggttgtacagtagttcccagcttggcataaggagtttccacaaaatgcagacactggtgatcgacacctcatacggctcaaccgtcggcatggtcggacacgaccccatcgtcgaaaccgactcacgcacccacgtcgaaaaactacaggtgaacatcgccacaaccgtggaacaagccggcctcaaaccggaaaacatcgaccgcatcatcgtaggcatcggacctgcacccttcaccggactacgcgcaggaatcgttgcagccaaagcgctcgccttcgccaccggtgcacagcttatcgggcagaatgtgctttccccgcaggtgcttgtgcgcaacgcggagcatgacggccgccatcatctgacgctcgccgtgaacgatgcgcgacgcaagcagctgtatttcacattgttggatggcagtggctatgaggccggtggcagcgcaggcgaagaccatgacgcaaacgttgaaaacggctgtgtggaaaccctgatcgacatggatatcgattatcccgaatcgattgcgaaccgtgtcaacgaggtgctggaacggcttcgccaggccgatccgaacgtggaatatgtggtcgacgtcgtcggccatggagcggcgaaatacgcgcaatcgtgggcaagccttcccgaaggcggcgaagtgcgcgatcaggcgctgctcgacgagggcgcgtccggattggaacgattcgcggccttcgccacttcgcaacagtctttggtgaatccggagccggtcgaaccgttgtatttgcgcaggccggacgtgtcggtgccgaacccgttgaagcatgtactcaaccatgccggcgcggaacgcacggagtgacgatacggcatgatcgttgaccatacaagcatcgatgaacagatcgcagtgccgcagatggccgctttggaagcggacctgttcggcaggggagcgtggagcgaacagtcgattcgccaggaattccaagcgccagcacgcacgtatctgttcgatattgatgatgacggcaagaccgcggattgcgggattgcgggttgcgttgccgtggatgagccggttgctggatcggttgcaggcgattctgctagacaacagcccgttgtgcgcggctatgccggtttctggtatgacggcgacgatgcggaaatcatgacgatcggcgtcggcagacggttccaacggcagggaatcgcggcttcgttgatggaggcgttgattgcgcgggcacgtgagcagggggccaaacgcatgttgcttgaagtgcgcgtcgacaatactccggccttggcattgtacgaacggttcggttttgccaaaatgggattgcgcaaacgctactaccagcccgaaggcatcgacgcgtacaccatgagccttgaccttgagccgaggatcgtcggcttcgcagcagcggaacaataaacagaacaaccaaacggaacagcaagcaaagcagcgaacggagcagcaatgagcggaccaatcgtactcggcatcgaatccacctgcgacgagaccgcggcctcggtagtgcaggggcgcaccctgatttccaacgtcgtcgcatcctccatggatgagcacgcgcgttacgggggtgtgattccagaaattgcgtcacgcgcccacgccgaagcgttcgtgccatgcgtttccaaggcgttggccgatgcgaacatgacgttgtctgacgtcgacgcgatcgccgtgtccgcaggtcctggacttgctggctgcctcgccgttggcgtgtccggcgcgaaatcgcttgcctgggcggcgaataagccgatttacggcatcaaccatgtgatcgggcatattgcggtcacacagttgcagttcggcccgttccccgaagacacgctcgccttgatcgtgtccggcggacatacgtccttgctgcatgttgaggatgtcgcacgtcatatcgacgtggtcggcaccacgcttgatgatgcggccggcgaatgcttcgacaaggtcgctcgcctgctcggtttcccctatccgggcggaccgcatatcgatcgtcatgcgcagttgggcgacccgcatgccatcaaagtgccgcagggactcacccaaggcaaagcgggccagcagcatccgtacgatttcagcttttccggcgtgaaaacggccgtcgcgcgttggatcgaggaacagcaggcgcaaggcaatgagattcccgtcgatgacgtgtgcgcgtcgctggcggattccgtggcgactgtactcgccaagaaggcgatgcgcggctgcgagcagtacgattcgaagacgttgattgtaggaggtggcttctccgcgaattcgcagcttcgtgccaaactgttggaagtcggggccgagcatggggtagaggtgcgtgtgccgcagctcaaactgtgcaccgacaacggtgccatggtggccatgctgggcgtcaacctggtcgaagcgggagtggctccgtcaaacccggatttcgccatcgattcggccatgccgttgacgaagatctccatgtaagattaggccgaaagcatcgtatggaaacgttttgcaagtcgaaacacacatgtgacacgctgaagatttgaaatccacaagttttggtgtagtatttttgtcttgtgcacagcgcattcctgcgtagctcagttggcagagcatccgactgttaatcggacggtcactggttcaagcccagtcgcaggagccatttgaaagcccttggaaatcaagggcttttgtcatattcgaggaatcaacgaagatgcccatacagcatccccgactcagaggtgcaggaaaaatgagctacatccacatcactgaagagaacatcgacaaggaacatatctgctgtgccatgtccggcaagcaaagccttgcgaaaaaagagtggctcaagcagcgtttcaacgaaggtctcgtcttctatcgtagcgaggaacgaggcaaatgcttcatcgaatatattccggcggaaaacgcatgggtgccgatcgatgcggacgggtggatctatatcaactgtctatgggtggccggttctttgaaaggtcatggacattccggtaatctgctgagcgaatgcatccgagacgccaaagagcaggggcgcaaaggcatttgcattctctcagccgagggtcgcaaacgagagttccttgccgatccgaagtttctgtcctacaagggtttcgaagtgaccgacatatctgattgcggcatcaatctcatggccctgccttttgaagagaatgcggagctgccgaaattcaaggaatgcgccaagcatcccgcggtggacgaagacgggttcgtgctctactacaccgatcaatgcccgtttacatgctattgggttccgcgggtgcggcaaacggcggaagagcacaatattccattcaaaacgattcatatcaccgataaagagaccgcccaacgtacgcccgcgccggtcaccacgtatgcgttgtttagggacggcaaattcctcacccaaggcatccagtccgacaaaaagtttctggcattggccggcttgtaacgtcctgaatcttccacccactggggaaccttcccgccaagaaggcagttggcgtacggattgttccagcgggtgggtgttttggggactcgggaggcgggctattctctaacacgcatgcaggagacctcgaatttgcgcgtttgacggagactctgctatcggttgcgaggatccagcggatcacggtcgtcgtagaatgcgtagatatccagactaggttcttccacgggcaaaacttaagattttcccagcaaacggcgtttaccatgaacacgcaagcaagaaaaacacggcaaatcatggaagggagtccatatgtgcactggtgttcgtttctccgacgatgagggaaacacatatttcggccgtaatctcgactggagcttctcctacggcgagaccattctggtcactccgcgaggctaccggtatgactatgcgtatggggccaaaggcaagagcgagccgaatgcggtgatcggcgtgggcgtggttatggccgatcgccccatgtatttcgattgcgccaacgagcacggcttggccatcgccggattgaacttccccggatacgcctccttcgcgcacgaaccggtcgagggaaccgaaaacgtcgccactttcgaattcccgctgtgggtggcacgcaatttcgacagtgtcgacgaagtcgaagaggcgttgaaggacgtgacgctcgtttcgcaggtcgtgcccggccagcaggagtccttgctgcactggttcattggcgatggcacccgtagcatcgtcatcgagcagatggctgatggcatgcatgttcatcatgacgatgtggatgtgctcaccaatcaaccgaccttcgacttccatatggaaaacctgcgcaactacatgtgcgtgagcaacgaaatggcggagccgaccacttggggcaaggcggaactgagcgcatggggcgccggcgtgagcatgcacggcattcccggtgacgtgagttcgccgtcgcgtttcgtacgtgtcgcctacaccaacacgcactatccacagcagaacagcgagtccgccaatgtgtctcgtctgttccacacgctggcctccgtacagatggttgaaggcatgtccaagatgggcaacggccagttcgagcgcacgctgttcaccagcggttattccggaaagactaacacgtattacatgaacacgtatgaggatccggcgatccgctcgtttgccatgtccgacttcgacatggattcgagcgagctgatcaccgccgattgattccggaatttcgagttcgaagattccgcagtaatcgcactatgtgcgatggcataaaaggacgcaacgtcgcagtcggcgttgcgtccttttaatcagtaaaactgatgagatttgattaaaaaattggctatgtcacaacaaacagttgataaatagccatttttataggggagtatcagaactcccctacaaactgttatttgcagttatctatactcatttggaatttcgatatgaagtgtctcacacaataacttcacatcatgtgcatcattttcatcaaactcgtatcccagatggaacattacttgactatatggttcaatacaggaaacctctatttcctcaattcttcctttacccgaaaaagtttctaccggaaaacaatccccatcataaagaatttcaccttcgtccgtatattcaaaacaatgcaaatcaataattctgtttttcaaatcttcccatacagtatggttcaatgttgtatattccatcttaatctcataaaagccattagctttcattatttctataaagttctgataatcgttcttttctacaaaaatgtcaatatcattatgggctcttgactgatatccaagaagagcatctacaccccagccaccatcaagaaagactttaatctccgcatctattgcaaattgaagaatctgttttacatctgttatattgaccatcttatcatctccacaaattctaattaggcgaccagaggaactgctggtctgtttgataaatctctgcatttagcagttttcaatgttgccaaaacgaaagttaagaagatgttccttttctccatgtcgctttctttggcgtaatttacaaggttattccacacaagatagttgttcagatacttggtagaaacaccgttaaagccacgcataaacctctttagctggctatggtagctattgatatgttggatattataaatgcctttcttggctttgccagtctttaactgcacaaggtcaatgccattggcatttgtaaatctcacataggagttcatcttgtccgtaacaagagtggaattggtcttaatcctaccatcataaatatgatgtaaatctcttgtagaaactctaccagtattcgtaatcttggagatagacaagccattcctattaaccgcacaaggaacacataccttttcttgggacaagcctctgatatgtgtagaatgaccacgcttatgagccttgcgtggcatagcaaatgtcttactcttgctatgattgcccttgtacgagatggcgaaaaaagtttcgtcagcctcaataatgccgtcaagggtaacatcgtctgccatattctgaagtgcatccaaaatcttgtgtctccaaaggaatgcggtgtttctgtgaatcccacaagcaacagcagtcttacgaatggataagccattcatcatacaatcaatgtactgctcccacacggacaagtcttttcttgtaccagacacaatggagttcgtagcaatcacgaaggacttgccacaatccttacatacatatcgctgtgtgccatctttacgatgaccattgcgaaccacatggatacagccacaaagagggcatacacgaccatttgcaaagcgttcctttgctacgaaatcttcaatattcaaagactttacaaaggcaggacttaaaagcattgttttaaggctttcctgctctgcgacagtcaacttaccgataatatctaatgcgtctttgatagtaggcatatccaattacctccttcggtggtactgtttcttactattattatacgctatttctcgtcaaaaatcaaccatttgttgtgacagagccaaaaaattaaaatggtcgaggcatgcttccaaacgtactttcaggcgttttcttcgttatgttccttatgcgaggaagcgaatcgcgacagaacacctgacttacgtaaagcgcaatacattccccaggaaccgaaaccggcgaatgccaccgcgctaagcagctcgcaaatagtgccgatgatgcctcgcgggctgaagaacgtgaatgcctgatagtagaagaacagcaggtagaagttgtagacgattccaatcgccaaagcagacagaatggtgacgccgagcgtccaacgacggtagcggaacagtgcgaataccgcttctgcggctgccgcctgcagcaatgcgattaccaccaggctcacactgtatttcgtgccgagtaccacctcgacgaacgatgcgaccaaaagcacgtaggccgaagctcccggcttgcgcacgatcagagagcccagcgtggcggggaagtagaacaaagcatgaagtagcgccgctgaaccaggaagaatcaaagtcatcaacggaaaaagaccatacgacaggccgtcgaacacccaaaacatcactcccgacatcacgccgaccgccgcgccgaccgcgatatcgaccacacgccatgtgagggccttgtgtattccttggtttgttttcaaaggctgccttacctgcttcgacagcttcgcgtctgtattatgaataacggttttagagaatggcttcgccataatgataatgaatccttgcgttggtcgatgccgtgcaccgtgagtcggagatcgcggcagtcgccgtgggccgttcctcgacctgcgcggctcgggcaggaacgacgaaaggtattatacgacgtgttgtttgccgaatacgcatcatggatttccctgtatccaaaatatcgttacaaatattccaaatccgcatcatggatttccctgtatccaaaatatcgttacaaatattccaaatccgggcgtacggtccagtccagtacatctaatccgcacgatttcgttcaactcagcagcataagagctttttgttgtgaggtggcattcgtccaaaacagcgtggtctgatgttccttacgatgaacacgtaagttacgctttgcagacgcaacttagctaattgtcaggattacatgttcttttgctatgagatagcatgcaacacgccaattagacttcaagcactttaagtttttacagtgcagggtatgagcactacaacatggcatacgattcgtgaagcatccatgatttccggacttcccgaatccactttgcgctactacgagcaaatcggtatcattgccccgatcgcacgtgacccaagttctggccatcgcgcctacaccgacgaagacattcaatcgttggtcactatttcctgcttgtctgcgactggcatgccgcttgacgccatgcgcgagtatctgaaaaaccgtttcgacggaaccgaaggtgcgcgcaggcaaatggcgctactggacgcgcaggcgttgcgtttggccgcaaaagccgaaagcatccgcatgcagcaagcctatgtttcccttaaaacattgtattggcgtgccgtggcggaaggccatgacgacgaagcgcaacgacttctggaggaaaaccacgatgtcatcgaaacagtgaaaaaacagattcgtagcaaggctgacgcataagtcgaggcgtcatcgcagacgttaccttaattcaattcgtataacaaaggagcaactcatgaaggcagcgatcttcaagggagtcaagcagatggcatgcgaagagcatgccgaaccgaccatcatcgatgggggagatgccatcatccgcgtggtacgcgcatgcgtgtgcggatccgacctgtggttctaccgcgacggcagcaaggaacccaacactcaggccggacatgaggccatcggcgtggtcgagcagatcggcgacgacgtgaccgtggccaagccgggcgatttcgtgatcgtaccgttcccgttcagctgcggcaagtgcccggtatgcaaggccggtttcgaatccagctgcccccacggcggatatttcggagacgagggattgggctgtcaggcggaatacctgcgcgttcccgaggccgatggcacgctggtggtcgttccgggcgacgcgaagagcttctccgacgaaatgctcgcatcgctgctcaccctctctgacgtgatgtcgaccggttaccatgcggctgcttccgccgaaatcaagccgggagacaccgcagtcgtgttcggcgacggtgcggtcggcctgtgcggagtgctgtccgccaagctgatgggcgccacccgcatcatttccatgagccgccatgccgaccgccaacgtatcgcacgcgaattcggtgccaccgatttcgtggaggaacgtggcgacgaggctgtagccaaggtactggaaatgactgatggttacggtgccgacgccgtgcttgaatgcgtagggtccgcattgtcgaacgacactgccatgaaggttgcgcgtgcgggcgctgtagtcgggcgcgttggcttgccgcacggcgtggaagccgatattccaggactgttctaccgcaacgttggtctgcgcggcggtccggcaccggtgcgcacgtacgatctgcagcgactgctcaaggaagtgctcgacggcaacatcaatcccggcatcgtctacacctccgaatacacgctcgacgatattcaggaagcgtacgcggccatggacgagcgccgcaccgtaaagtcgctgctgcgcatcagtgaggtctgagcaatataccgacgatagaataagcgcaaatcaaacgaaaggaagcaaatcttgtttgaagagctgcacaaacggatgaattcgttctggaacaatgacaggacattgtcgcaaaccgatccggaattcattgaattcttctcgaatttcgcttatgacgaagtggtgaacgaaccgggagcgaaccatcctgatttggatgacaaaacccgctctttggccattcttgccgtgctggtcggatgccaaggcttggatgctttcgaaatgatgctgccggtggcctacgaaaccggactgtcgtccatcgccatcaaggaaatggtgtatcaggcgaccgcatactgtggtttcggcaaaaccctgccgttcctgaagaaactcaacaactttctcggcgcggccaacgtgcatcttccgcttgaaccgcaaggcaccaccacgccggaaacgcgtgccagggcgggcgaagacaagcagatcgaaatcttcggtgaaggaatgcgtggattcacgcaatccggccccgaagatacgcgacacatcaacaagtggcttgcctgcaactgcttcggcgactactacacgcgcgatggcttgagcacgcgtgagcgtgaaatgatcacgttgtgcttccttgccgcgcagggcggttgcgagccgcagctgacgtctcatgcgaaggccaatatgggcgtaggcaatgagaaggcatttctgattgccgttatttcgcagtgcatgccgtatatcgggtatccgcgtacgctgaatgcgattcgttgcatcaacgatgcagcggagcagatgcaaggctgattgcggtaggatttcgttcgcttcagtacgaaaggggctgtttgccagtcacgattggattggcaaacagccccttatatgttttttacaagcgcgctacgcgtgtgcgatcatcactcgccccatacgtccttggcgacggactgcacgagcgcgatcttggcccactgctgctcttcggtaagcttgttgccttcctcggtggacgcgaaaccgcactgggtggacaggcacaagcggtcaagcggcacatactgggccgcttcggcaatgcgagccttgatcacttccggatcctcaagttccggcttcttggaagtgatcagaccgagcacaaccttcttatctccggaaaccttggcgagcggctcgaagtcgccggaacgatcatcgtcgaactccaggtagtaggcggcgacgttttccttgccgaaaagcacgtcggccacagtggcgtatccgccggcggaagcccacgtggagtggtaattgccacggcagtcgtgcgtggtgatcaccagatcctctggcagatcctcgatggcggcgttgttcatggcggcatactgttcctgcatggcggcgaactcatcggcggtgtaatgctggttgaagttcggatcacagaacatgccccacgtgcagtcatccagctgaacattgcggcagccggcctcatacaatgccatgatcagaccatggaaggccttggcgttgtcgtcggcaagctcgtcgtaatccttctgggtgtcgccgtagaactcgtgcacggaagcgatgttctccgggcggaacagctccgcatacagctgtgccggagccggaatggtctggcgtgcaatggcggtgtcgtcttcgaactgcttgatgaacttgaaatgctcaacgaacgggtgggccgggtcgaaggcgatcttgctggtcaggcgtgcggattcggcgcgggtctcctcatcgtggaagaaatagcccttgtccatcgacaccttttccacgccggcgaagccccacatgcagtcgagatgccaccagccacggcggaattcaccgtcggtgatgacgtgcagaccggcggccttctgcttggcgaccagttcggtaatggcattatcttccacggccttgagtgcggcctcgtcaatcttgcctgctgcgaaatcggcgcgagcctgcttgagttctgccggacgcaggtatgagccgaccacgtcggcgcggaacggcgcgttctgggaatacgtcattggatgctccttgttgtgctgtcagtgaaaatacctagggaagactagtcaatccttcagaaaaatgcacgattacgtcgggaatatgagacgggcgcattatagtgttttgcgattgaacgacatatgattcgggggggggtgatatgagtgatgggaccgggcggcaggcaatggcagcgcaaagtggtacgtcggataatccgaaatcttccaatcaggaatcatcgaaaaagccgaaaacgctcggcaaatatctgttggtgtcggcaacgcaaaccattgtggaattcggatcgttcaccttgctgcatgtgctttccgtaccatccgccatcgcgaacggcgtggccatcgtgctgtcggcttcgtacaacttcctgatgaaccgcaatgtcacgttcaaatcgtccagcaatttcggccgtagcgtggctttgttcatgctgctgtgggtttggaattacctgttcggttcgatcatgctggcatggctgccttccgcattcggatggaatgcggtgttggtgaagttcctgactatggcatgtcagttcgcgtggggctatccgctgtgcaaggaagtgatttttcgctgaacctgcaagcgtgtcaatccgggtggcaccctatgacagcaccctatgtatgattgaatatgtcttgtattaactccagaaagaaatggaaaggcaatgaacgaatcgcaagattccaacgacagtagtacgagcaatccgaacgatattcgccaacaggaggcagaacatcaaggagcggccgtaaaagcggcgctcggagccaacattggtgtggccatcgccaagctcgctgcggcgttctttaccggatcgtccgcgatgctttccgaatcggtgcattccatcgccgactgttccaacgaaatcgtgctcatggcaggcggtcgcttctccaagcataagacggacggcgatcatccgttcggtctgtaccgcgccaaatatctcgcttcgttcgtagtggcgacgctgctgtttttcgtcggtggtttcttctccacttcggaggcggtgaagaaattgttcgccattgccgaagaccccgcactgcgtgacgccaaccagatggaactgctggtggcgtttatcgtggtgtttatcagcgcttgtttggaaggctacggcctgcatcaaagcatcaaggaagcgaacgagcgtatggagcgcacgggtgtggcccatatgggtgtgttccgtttttggaggcgtaccaagtcggcggagcttgcgtccgtcattatggaagacacgcttgctttgatcggcttggcattcgcaggggctggcatcggtcttgcgattctgtttgataatgagatatttgatgcattcggcggtttgatggttggtcttgtattgattgcgggatcgttgctgctcatgttcaaatccggttcgctgttgattggtgaggccgtcgattcggatacgcgcaagaagattgagcaggctgttatttcaacgcctggtgtggaacgactgctgaatatgcagaccgtgcatatgtccgaggatgacattctgctgtgcgtcaaggtgcagaccagcaagctcgaccgcgattacgatgttgaaaccgtgaacaaaatcgaacgaagcgtgcgtaccgcgctgccgtggttccgtttcgaaatctacgtagagcccgacctctaccgcgccgaccacaaaatcgtctcgtagtggtgtgcggtgtacctatggttatgagacgtagagtatgaggcgacgatacggttttcaggaggagctggcattccgatgagttcggagtgccagctcctccttttcatgtgctttcttgttatgcgtctccttgagcccatacatatgcatcctttccaacatccgagctttagcctcatcaacctcggcgcgagtaatgccgctatccagtatgaactgctcaatgctatagctcattacatttcctttcgtatgattcctctaatctaatggattacccccatatctaatagatcgtaaaacccgttttcttgaagcaaaggcgtctaggtggaggtatgtctcggatgcgattggtttgtttatctcgagatgtgagacacacttacccccccctaaagcggtagggtgggtggtgcattcggggacgcatgcgcccctgtcataacgctccgggagacaggatggagaaaatggagaatatggagaatccgaagaaactggccgttgcgaccatcgcaggcttgaccgaggtggccggtatggccgcgcccgccatggcagatgagacggccgccgatccgatggtgggccagacccagtcggccgatccgacgaaggatgcgctcgacaaggccaacacggccgtatccgaatcccagaccgcttatgataatgcccagcagaatgtgcaggacgctcaatccaaggtggatgatgcgtatgcttccgacccggccacgaatgcggcgcagtccgaactggatgccgcccagtcggctaagaaggatgccgaccagtcggcggctgacgcgcaggccgatgtggatgccgcccaggctgctctggctgaagtgaacgccacgctgaagacagccgaaaccgcattggccacggcgaagtccgacgcggaatccgcgcaggacgcgtacgacaaggcccacaaggttgtcaccccgtcgaaggatacgaccatcacggttgatactccggacagtgcgaacagtgcgaacagtgcgaacagggcggccgtgaagacctccacgcaggccaagcttggcgacacgggcgtggacgtgatggagaccgccgtgtttaccattatggccgccggtaccgccggagccacgctcatgctgaagcgtcgtggtgacggccgttacggtcttatggcacgccacgccaagtaggtttttgccataaaatcctagaaaatgatgtgcggatgggaacgaacgattcccatccgctttttcctaaaacgtatgtgacataactcatcgaaagcacaagtatgcagggaaaactatctgaagtttccaacccgaatataagcgatgccgggtcaaagaatgtaactgaaaacaagaagaagagcagaaagcctgctgtgatcgccgtggcttcggtcgcggccgtggctgtgctggctggtggcggctggttcgtttggaagacctacgcgaaccatgagctggccgaggcgagacaggcgtgtgtggaagcgtcggaaagctaccgcaaggcggcggactcgtattccgggctggtggatggcgacgcggccacagcctcccagatcaccgtgaagcaggtggcggatgcgaagaccgtggatgcgttggccgaagcgttgaaggcgaacgagcctgacgtggtcgcctgcgtggccgattcgaaggcggattacgagtcgaagaccagcctgattgaaaagaacaccggctggtacgggaaacacgagaagagcttggaagaagcggtgaaggccgtgaacgattcgaaactggagaagaccgtttccgatgcggaacggttgttgaagaattcggacggcaaggtcgccgatgcggcgacgcgcgacgaactgtccaaggcagtcaaggccagggatgcggacaagatcgcggccgcgtcgaagaaggtcaacgactcggtgacggcgaagacgaaggcggacgaggaggcgcagcgcaaggccgaggaggaggccgccgcacaggccgccgcacaggcccagacgcagcagtcgtattcggcgccgcaacagtcgtacacgccctcgtattcaggcggttcgacatcgagtggcggcggttccagcagcgtgccggacttcgttccaagcagcggaggtctcggatgcacgacagactgccctccgtcctcaagcgatggattgattcaccactgatttagatgactcttcttctcaagggacccttcggggtccctttttcgtatccgcagccttccgggaaaatgtccaacccgacacgcccgaaaccgtggttgcatagcaggtggatgacggaaacgaatccgatatcgacgtttgtcgacggccgggcatgtgaagtgttcggacgggatttgttctcctgtccgaccccaccgggagtggggtgaacatctgcagatgaatctctgaaaggagacggaacattgggttccaagaacagtaacggaaggcgaaagacgctggccctgctcgccgccacggcgacattggccggaggcctgaccgccggcaccgcctgggccgggggcggcggcggagaccagggaggcaccggcggaggcggctcggccgcgcagttctgggcctacaaggacgacgcgacgggctcgtggggttccgcgaccgacctgaacagcgtgagccgcgccatggcctggaaaggcgtgaccatggacgattcggccggcaaggccgccaaggcgttgagcgacgcgaacgcggaatgcgtggccggcttccgccagaggcatccgggcgagagcgacggcgactgccgcgtcgtggccgtgggcgcggcgtccggcaacgggtccaccaccagcgtgtggaacgggtccggcgtctacgacgcgaagatatggaaggacaactggtacaagtacgtcgcaccgaacacttacaactacgctggatctcagtcttatcacaccggcgatggcttcagcgacgatccgtcgaacagcgtcgacaagatcatggaacgccatgtcgactcgacccgcagcatcgtcgtgatcgtgctcgacaaataccagcccgccccgccgaactacacgctgagcgtggccacgaaggcatccggcacgaccaccaaggccggcgacacgcagaacgtggcggacacggtcaccaccagccgtaacggcagctcgatcagtgagaacgtgaccggcaccagcacgctccgctgggccggcgtggacggcaccacccacaacacatggaacggtgataccgaagtcaccgccgaaggctactactacgcatccgaggacgaaaccatcctccagcccgtcgcacgcaaagacggcgaaaccgtcgaccagatcaccagcacgctgaggtgactgtgaacgtcccgaatcttccagctactggaagattcttcccgctgacgagcacatgagcgcaccaaattctccagtgggtggaggaatctgcccattaacggttacgatcgcatggtcggcacatgcgagaagaatcagtggcatgactgaagccgcacatgatgattatcagttgcccgaagaattcgaacactgttcgaaacttgcccctgtacgcgatgcgcctagcgcgttggaccgtgtcaagcaggtcgtacgcattctgcacgaaccaggcggatgcccttgggacggcgagcagaccaatacaagcctgcttaaaccactgttggaagaaacctacgaatacatcgacgccgtggaaacgaacgatcgcgacaacatgcgtgaagaactcggcgacatgctgctgcaatccgttttccaagcgcaagtatgcgccgtggatgcgcaggatccgttcggcatcgacgaagtgtgcaatcgtctcgtcgacaagctcatcacccgacatccgcacgtcttccaatcagacgacgctaccgacgcttccgcgccagcaccggaaaatgcgcaagatacgttgaaactgtgggaagcgatgaaacagaaagaaaagcatcgcaagtccatgctcgaaggcatctcccacgcgcaaggcgcattgccgcgcgccacgaaaatcgtatcgagagtacacaaatcgcagtattgcgatcagcttgaaacagcattcacaacaagcgcaagtcaaatggacgaacagcatgatggcgatcatccttacgctgacgaaatcatcgccatcatccgcaaagcgcaacgtgacggcgtagacgtggaatccgacctgcgttgccgcctgcgcgacatagaatccgaaatcgaacatatcgaaaggaccatgaaccatgagtgacgtcaaagcactcgaccctgcgctgctcaaacagtattccacagacttcaacgctgaccgcgccaatctggtggcagccaacgcggcagtatcatccggtgtgctcgccgcagccaccgactataagggcgagcgcgtgctgcagaatgatttctccatcgagctgaagcaggggagtatcaccaatcagcgtagttcggggcgttgttggatgtttgcggcgcttaatacgttgcgttatgagttgatgcatcgttggaatttggaggatttcgagttttcggaaacctacctgtttttctgggatgcgatggagaagtcgaacacgtatttggagaatgtgcttgccacgttggatgagccgctggatagtcgtgtgttcgaggcgattaattatggtccggccgatgatggtggttggtggcagatgttcgctgatttggtgaacaagtatggtttggtgccgaagagtgcttatccggagtcggctaattcgaagagttcggatgcgttcaagcagtatttgaatacgaagctacgtgagttcgcgtccgatttgcgtgaccgtcatacagctggaacgtcgttggatgagttgcgtgcgttgaagaatgcggatatggctacggtgtatcgcatgtgtgcgattgcattgggtgagcctccggagcgttttgattttcttgcgcgtacgagcgatgacaaggatgacggcaagaagaaaaccacgggggaggggccgtctgaaaaggctgcgaaaaccggtaaggatgagcgtccgcagattcgtgaattcggtatcactccgatggagttttataagaagtacgtgccggtggatgtgaacgatctggtcacgctatgcaatgtgccgatggagagtcgtccgtttggcaagcggtatcgtattcgtttttccgccaatgtggcggaagcgggtgatatggagtttgcgaacgtgcctcttgacgtgttcaagaaggctgctgtggaccagatcagtgacggtcatccgatttggttcgcttgtgattgcatgcagttctcgttgcgtggcgatggctattttgattgcgataccgtgcgcgttgaccagcttttcggtacgaaattcacgttcgacaaggccaagggattggagtatggcgattgcccaagcaatcatgccatgacgttgactggcgtgaatttggatgctgacgggcgtccgaaccgttggaaggtggagaacagttggggcaaggataatggtcaggatggctattatgtggcgtccgatgcttggttcgaccgttatgttaccgaactgatcattcgcaaggagtatctcgatgagaccacacgcgaaatactggccgatcagccggtcgagcttgaaccttgggagccgctcaccaagcgaagccggtgaaggcttgcgcatatcgcgcatgattcggtttgattgcaataaggaatgagataaacagtggagggcgtcgattgacagattcggcgccctccacttattgcagtatttagtcattatttaattgctattcggcagtaccaaggcatgcttcgaaggaacggcgggtgaggcgtccacggttgacgacgcccacgagcttgccttgttcaaccaccggcactttcttgtactgctgatagccgaacatctggcagacttgcgcgatattggcatccgattgcacagtgacggccggctttgcggcaataaccatgacgttcatatcaagcagttctgcgtgagacagttccgggaattcgccgcgggccatgccagtgaccagcgtggaaatgtcggaaaccggcgcgttgtcttgtgcgaagcggcgcagtacgtcgctatcggagatgaagccgaccacgtggcgttcgtcatcgacgataggcatgccgctgatgttcttttccaacatcatgcgcactgcgtcacgtacctcggcatccgaggctaccgtgtaaacgtcatgctgcatcacatcggcaacggtcttgacatccaaagcgggaacatgctgttgcgcggacttgttccatccggcggcatcgccgatggcgtgaactatcttgccggacaatggtgcgacgatcagcatctgaatcggcaacgcgatggtgaaattgtaggggaacatgcgccagaattccgtgaacgcgccgaatgtgaaaccgaatgccatgatggcgccgaatacggtcatcagcaccaccatgaggaatttgaccgtgatgcctttccataccgcacggtcggttgccgcgcagaatgtattcataatcgcgcgggagcttggcgtgcagatgcacaaatcgcaaatcatgccgaccacgtaggccaacggccagtcgaacaatgcgtagctccacgccgccgcaccgacgtcaccgatacgtacgccgtaattgagtgccgccatcacataaatcatgatcgcggacatgatgaaactgaagagaatgccctccttgccgttacgtggcacggaacttcctttcgctatgcgttcgatgtgttgctgcatcggcccctctggtctgttccgcacgtcatgttccaacaggagcgcggaaggctagggggcgcataacgaaatccgaaaaggttcggacgatcgcaatggcgacttcctggcaaacgaatcgactcaagccctcaatgggcatgcaagatgcgattcatgagtcggggccgcttgcaaatcacagattgttcgcagaccccaagacaaatacggaaataccgaacgtgctcgaaacgcatgtggaaagaaaaagccggacgttttcgcgtccggcataaatacaatccgaataaaactcgaattactcggcttactcttcggcgaccaattccagataggaatcattccacaggtcttcgtcgccgtcaggcatgagcagcacacgttcagggttcaatgcctgcaccgcaccctcatcgtgggtgacgagcacaatagcaccctcatacttggcgatggccttgagaatctcatcgcgtgaggccggatcaagattgttggtcggttcgtcaagcagcagcacgttcgcacggctcgtcaccaatgtcgccaacgccaagcgggtcttttcgccaccggaaagcacgcgagccggcttcaacgcatcatccccggaaaacaggaacgagccgagaatcgaacgcgcctgcgtatcattcagttccggagccacatgaatgaggttttccaacactgtggcattcaggtcaagcgtgtcatgttcctgcgcgaaatagccgattttacaaccgtgaccgtagtccacggaaccggtgtccggctcttccaaatgcgcgagcagacgcagggtggtggtcttaccagcaccgttgtatcccaaaatcaccacacgcgagcccttgtcaatagccagattcacgccggcgaatacaatgttcgaaccatacgctttcgacacatccttcgccatgatcggcgtgcgaccgcacggagccggctccgggaaccggatatccgccactttctcctgcttttgcgcttcggacgtgttctcgagaagtttctccgcacgacgcatcatgttctgcgcggccacggccttggtcgccttcgcatgcaggcggataccctgctgcatgaggcgttccgccttcttctcggccacttcacgttcgcgacggcgacgttcctcatcaaccacgcgctgatgcaggtaggctttccaaccaagggaatacatgtcgatctgtccgagctgcgcatccagatgccataccttgttcaccacttcgtccaacagttcggtggagtgggagatgaccaggaatccaccctcgtatttcttcaggtatccgcgtaaccattcgatggagtcggcgtccaaatggttggtcggctcgtcaaggattagcgtatccgcgtcagagaacaggatgcgggccaattcgatacgacgacgctggccgccggaaagcgtacccaattgctggcccatgacctcctgcggcaggccaaggcttgccgccatcgcagttgcctcggactgtgccgcatagccgccggccttttcgaaatcctgcatggccttgtcgtaacggttcatcgctcgggtcatgacgtccggatccggatcggtcatctccttttcggccttgcggatacgactgatgatggaagcgatgtctcgcgcgctcatcatgcggtcgagcgcggtctgttccggatcggcagcatgcgtgtcctgcggcagatagccgagcttgcccgatacacgcactttgccggcggtgggcagcatgtcgccggtgatcacgcgggtgagcgtggtcttgccggcgccgttacgtccgaccagaccgatcttgtcgcccttggcgacgtggaaattcgtgggatgcagcaacgtgcgcgcgccgatctgaatctcaagctcctgcgcttcaattgccatgcctcaacacctctgcactttcgttactgtcgttccaaactggctgtgccgcacataacggcctgcccatcatttcataaggccaaacgccaatcgaacatcataccgaacgcctgtaaccacgtgaatcccaccgcgtggtacgcaatcgcaaatggaatagattgcgcggaagcgtaacaatcagattattctggtgagcaggcaaattcggaagggagcaaacatgaagaaagctttgatcattgtggatgtgcagccgacattttgcgaaggcggcgaactgggtgtagccggtggcaatgccgtcgcggaacgtatcgcggattacgtgaatgcgcatcgcggcgagtacgaatacatcgcaaccacgcaggattggcatatcgagcccggctcacactggtcggagcaacccgactatgtggatacgtggcccgtgcacggcaaggccggcactcccggcgccgaacttcatccagcgatcgccgcgctgcatgtagagcatcatttcaagaagggacagtattcgccgtcatattcggggttcgaaggatacgaggataatacggattcgattccttcccgcgaacaggtcgcctctgacatggctacagggcgtacgcttgccgttgcattggaatccgcgggtatcgaatgcgtcgacgtggttggcttggccgaatcgcactgtgtcaaggaaaccgcgctggacgcccgtaagcttggacttgaagtgcatgtcatcgaaaacctgaccgaaccggtcagtgaagaactcggcatcgcagcccgccagcaaatgctctccgccggcgtcatcctcgactagtttcttgaggaatgggacaacgaatggagaagggattgttcagcaggcgtgtttatgaggtggtgcggcgcattccgaagggtaaagtcgccacctatgggcaggttgcggctttggccggagcgccacgcaacgcgcgttttgtcggctatgccctgcattcgaatcctgagccgggtgtgattccatgtcatcgtgtggtgttccgagacggctcgttggcacccggattcgcgttcggcggtccggaaagacagcggcttctgctcgaagaggaaggcgttgtcttcatctctccgaaaggtatgcccgaactaagcgagtcaggcaagatgaaagactcgaacgccggagcttccggactgcgagtcgatctcgcccgttgtcagtgggacgcctagtcgctttcaatccgtgtcaaccgcttacgcccccaacgacatttgctttatccgccgtggttggataatgggtgcctgccataaggcgaagaaagcaacggggacgcaaaggtggaacggcaaggcatgtggcaacaggacgcaccaggggcgatatcggttggaatgccggttgtatcgttggcaccggctccgcgaaccatggcataacatcggcttaagtcgttggaaaatagcgcgacacgccgcgatttgcggagttggcatgcttcatgtatattttctactcgttgcccaccacggtggaaacaacttgcggacatagcttagttggtaaagcgcaaccttgccaaggttgagaccgcgggttcgagtcccgttgtccgctccattcgaaagcttccggaaggaagcttttttcatatccgaccgcaaatccgggcgtcatcctcaattcatcccgaccgaaatccgaactggaatcctcctctgttgagaaaacgtttgaccacaatgtgaacgttctcttgaaaagagataatccatgcgagaggctaggagaagttccgccaaaacaggcaacgatgccgggggagagcggaacggacggaggtaaaacaaatgaacgagaacagcgacattattttcgtgccggacgattccgccagccacgagtggacggaacgggacagcgaactcgtagaggagtatgcggcccagcttatgagcatgagcatctagccggaaattagatggggccgggttccctcttccatgacaggaaaagacgtcgcattcgtactgtaactgcggcgtcttttccttgttttcgtttagaatggagacttgccgccaaggcatcgaacacatggaaaggcgtattgttggctgagatcagacgggagatggaacggcttcgacccgtatacgaaaccggtgtcctacggttgctgctgcgtaacaattccatgctgtacgtcgcgttgttgcgttccacgttcgacccgctgacgggggagctgccgcgcgaaatcgtcgaagaacggttcgcgcgcagtctcaaccggctcatcgaaaccggcgattacacgctgaaagacgggcagactgcgcgcgaggccgcgcattcggtcctgcttgacctcgcccgcgaaggggaaggcgactacgcctggctcgccaattccatggacgtggcctcgcaccgctacctgtaccgtctcacagcgcgagcgcaccgtgccatcgaagcgctcgaccggcttgaggacaccacgaaagcgctgtccggcgcgcaggccaacagcatcatcatggaaatcgagcatgctcgcatgcagttgaccgccgatccgcgcgaacgcatccgcctgctgaagagggacattgaggaacggcagaaggaaatcgacgagctggaacatagcgaggccttggaaaagctcacgtccgaacaggtcggcgacatcatcggcgtgattcacaacactctgcgaggagtgcccatcgacctgcgcgagctcgccctttccgaacgggacaacggcgacgcgctccgacggcgcatgcaggccggcgccatgagcgtggaaagcatcctcaccgcataccatgacgaataccgacgtgcgttccgcgaatccgacagcggacgtcgtttcgaagacgcgttccaagtcatcgtcaccgacgaaggccggcgcgagatcgacgacgcggtgcgggacatcgccagaaacccctatttggatggcgagccgagcgtgctgctcaaccaggtgcgttccgaactcaaacgcatctatgaaggcatcgaggacgtgcgccggcagatccgcacgtccgacgaggcggtcagccgtctcgtacgccagcagaccgacacgagctaccggaccatgctcgccaaactcaaccagctgttcgcaaagaccagcgccgaagccaaagcccatcccaatgaccaaagccggccctaccatacggacgccgggcaggcgaaattcccgacattgccatctcgtccggccagatcaatggcgcgcgccgcatcatccagcctgaacgacgccccagcggcgaccatcgaagcgccggacctcaagaacatggtcgaaatatgcgggccacggctgacgcgcatgatcaggcttatccgcagcaatccggtgacgacatcggacggcatgttcgtggacctcgcggcaagcttcaaccagctgccgaaagccgaacggagggaaagcgaactggtcggcttcctcagtgccctgcgcacgcaggacgactcgtcatacgtgacatggcgctgcatatcgatcgacggcagcgaacgcgtatggcgcaccaaacccattctcaccaccgaaacgacgctcgacgacatcatcgaggagagataagcatgacggactatatcgaagccaacatcgaggaaacgatcctgacaggaggggagccggtattggaagaggccggcagccagcaggcctcgaccgcgctgttcaacggcgacaccggcgacatgcccgtcgaagcgcgcatggccgcgatcgcgctcaaacgcgaacgctacatcgacggcagcctgtatgacctcgcctgcgagaaccgtgaggtcgtggaacgttcgctcaacaacgacatgctcagactggtcgacaacacgaaataccgcatcatgtacgcgtcgccggtcaccgactcggagacatgcatccgttcgttgaaaacacgtatgagcctcacccgcgaggaggccgccacgcttgccgcgctacgcatcaaagcgttggaatacgaaaaccagaacgccgaaccatgcgactggcttatcagcttcgacgacatccgcgcattgctcgccaccggcgcgggattcctcaccgccagcaacgacgaggaaggcactgcgaagaaaatcacgtccatcatctcacgcatgcgcacctacgggtatctcgcgccgatcgaagacgacgacatgtacgtcctcacgccactggtgcccatggtgctcgaccgcggcctcgccgaccagtggctcggatccgaaaccacggacgagaacgcatccgccgacggccgcaccaacgccggcccggacgacaggcccatggaagacatagaacaagacgcattcgatttcaacaccgacgacaaccgtttcgacgaggaggaacactgatggcagacggcatgaagatcgtttccgacaagtggatgctacaaagccgacaaatcgtcaactggggctcatacggcggctggcacgaattccgcccatccatggacgaaaccatgccggtgaccctgctcgccggcgccagcgaatcaggcaaatccacactcgtcgacgcgcaaatctcactcctctacccatccggaaccccctacaacaaggcgtcgaactccggacgttcggaacgcaacgactacacctacctgcgtggcatgatcggcgtaagcgatagcgaaaacggcgaaacgccgatcttcctgcgcggcaaagacgccgacggcaccccacagaacatctggggcgcaatcgtcgacacctacgtgaacaaaaccgacggaggactgctctcctgcggcaaattcctctacctgaacgccggagacggacaagacggactacgccgccgctacatcacctggaaccgaaccatcgacccacgactcatggaccagtaccgcaacacaccattcacccggtccatgttcgaaaaaacctatccggaatgcaccacgcacaccaacgccgcggcattccacgcctccatctggcaggacatgggcctaagcgccgacgcctgccgcctcctgcacaaaatacaatcggcggacgccccctcaaaactcgacgacatcttcaagcaaggcgtgctcgacatacccgaatccatccgcctcgcccacgaaaccgtcgacgactacaaccggttcaacgaaaacttccacagcatggaagacaaaatggcccgcgtcgccatcctgcaaaacatccagacacgctacggcgaatacgcaaagcaaaccagcgaacgacgcgaatacgaacccatcaaccccgacagcgaacatggcaacgcaacactgtccgcatgggcgcgctcgcgcatggccagcgaagtgcgcgctggtctgccggccgcgcagcgcaaggtcaaggagtcgcaggaggccatcgatcgggcgatgcagcgcgtcggcgagctcaacacgcgaatcgacgccgtcaaggaacgtatccaaggtatcgacggcggcagtctgcagcagctcggcaaggatcttcaacgcgtgcgccaggacatcgacgaggcgagcaggcaacgtcatgccatagccgaacgattcgaacaggtcgaaggcaggcttcccgacagcgagcagacatgggacgccaaacgcgccatgctcgccgaaacgctcgacacatacgaggaacggttgaaggacgcgaacgccagattccagcagctggtaggggagcgtcacgaccgccagcgcgaccgtgacagcctacgacgggactatcagcgcaagctcacgcacaggacgcgcatcagcgatgacatggacgacgcgcgcacgcttatcatgcgggcgaccggattggacgcgtccgaactgccgtatgtggccgaactgatggacgtgaacgaacaggacgaacagtggcgtctggcaatgaacgtcacctacgcgcccatcgcgcagaccatcctcgtcgacaaacgccacgagcaaggattcgcggcgaaaatcagcgctatcgacccgaaactcatgacacgacgcacgtggcggttcatcgacaccggcatgcaatacgaatcctccgccagcgaaggctggatgtcgtcgaaactgcaataccgggaggactctccgttcgccggatggctgaaaaaccagacgacgtcgccacggttcgacgcgcgttgcgtgcacgccatcgacgacatgaaccatgacgaacgacaagtgcaggccgacggacaaatcaaatccggcgaccgtggattccacggcagcaaaggactacaccaggtcatcggcttcatgaacgaacaatacctggccgaactgaaaaaccaactcgacaaggcggagcaggcgttgcagaacgccgaccgtcgaagcgaacaaatgtccaacgccatcagcctgctgcaagacgagcacgagctcgcacgaatcgtagccgacatgccatggagcaaaatcgacgtgaacggactacgggaacaggaaacgcgaatccgcaggcagatcgaacgcatcgaaaacgacccggaactcggccaactgcaaactgaactgaaacagctcaaccaacaggccaccgccgaaaacagaaaccagtaccaagccgaagacgacctcgacaaggcccaacacgccgtccaagccgaacaagcatggctcgacgcctacggcaacgacgacttcgacgacgccacactatccagcatggtatcgaacctactcgccgacgcatacgagaactgcttcggcgcatccgtacgcgcgcaagaccggccaaaactcatcgcaggcctcttcgaccatgaaagcgaaacaccattccacacgcgcgcgctacgcaacatcgtacgcatcgcacgcacacgaatccaagaaatcgacgccagatccaaccaactgcgcgccgacacggaacgcatcatggacgactacctcaacaaccactccacagacgacaacaccgtcatggcaagcgtggaagactaccgatacttcctcgacgaactcgacgaactcaacatgctcgtcacccgcgccgcaaccgacgaagaatacgccaacagcgtcaaaaaactctacatgagcttccaacagctcaaccgtgcgctacgcaccgacgaagaaaacatcaaagaacaactcaaccgcatcaacagcatgctcaaaggacaacaattcggcccacaaggcggcagactatcactcgacgtgaccttcagcccaatcgaccgacaattcgaaacaaccctcagccgcatcctgtcaaaactggaagactggacgcgcaacgcaagcgacaatcccacggaaacacgcaacgcattcaacaactgcgaaacattcgtgaacagactgcacaacgaactcgacaaaatacacgacaccaacggcatcaaagcatacggcgcacgcaacctcgacccacgcgtacgcagctcattctacgcaatcgtgcaccacgacaacgcccccgacgaacgcatcagctctaccggcggaaaatccggcggagccctccaagaactcacctcattcgtctacggcgcagccctcatctacctcctcggcggcgacctcaccgcacgccccacctacaccacgctcttcctcgacgaagcactcatcaaagccgacggccgctacaccaaacgcgcgctcgccgtactaccccgactcggcttccaaatcatcgtctccgccccggaaagcaaaaccgcggaaatcctcaacgtcgccaacagagcatacgtcgcatacaaagacccatccaccggcaactcatacctacaggaactcgacagcgaaaccatcacacaggacgaaacacagcccaccaccgcacccgcgaaaccaacaacggaggcataacccatggcaacggccagaagcaccaccaacagcgacatccacagccaactcaacggatacgtcaccgactatctcaccaagcacatgtatgacgccaacacctcctggccattgcgcaaaaccatccgactacccaaacaagccgaactcgaagcccattacacgcacatccgcgcccaagacgaagccatccgcaactgggcacaacaacaccactgcgaaaccagcgaaaaaaccaaaatcatctccaacggaatcgtccgacaaaccagccaactcatcgactcggtaaccatacccgacctcaacacggccctcaacatcaccacaccacaaacacgcaaactctaccaacgcgaacaccaacgcgcacacaccatcaccaaccaattcaacctcgactccaacacctccataaacatcgccaaaatcctcaaaaaccacgacgacaccgactttaacctcgtcatacaagccgcacactacttcgccaaccacaacaccgaaaacatgaccccacgcatggtccccatccccggattcagcgcaaaatggctaggcaaaacaacatcaaaccgctgcaaagcaatctgcaaactcctcaaacgagaacaactagccctcaacgaccgccacggagaaatccgactccgactcctcgacacacaacaccacaaccaaccagacctcatcgtgacacaaccatggacagacggcgcgccacacgacatcacccacatcatcatcgtggaaaacaaagacacctaccaagccatacccacaacagaacacgccatctgcatattcggcagcggacacgcggcaacccgaatcaaaacactactaccttggatcacaaccacaccccacatcatctactggggagacatagacgcagacggcctcgaaatactctccgaactacgacaaaccggcatcacctgcgactccatactcatggacagcacagcatacaaaacatacgaaccatacggcaccaaactcgacaccaaaaaacaacccctcaaaacacgcgaccccaaaccaacaccaggactcacacaacacgaaagaaacttatacgaacaactctgcaccgggaaaaacacaacctacctacgaatcgaacaagaacgcatccccatcaacgacgcaatgacaatactccacaaccaacaccaatggaacacaacacaccacaaatagaacacctgttcgaaatcataacgaaaatgaggtatcctaaacaactagaacaaagaacaaccaccagcggaggcaagccgtggcaaccaaacgcaacaacgcagcaaacggcgacgtcatagtcgaacgcgttctcaccagcgacgcattcctcgcaagagaaatcaaaaaagcccctctcaaaacgaaaaacggttcacttacagccgacctcaagcacctgcccaacgacctcaaaatcaccatccaaggcgctcgcgagcataatctgaagaacgtggatcttgagtttccgcgcaatcgcatggtggtgttcaccggactgtcgggttctggcaaatcctcgctcgccttcgatacgttattcgccgaaggccaacgcagatatgtggagtcgctgtcggcgtacgcaaggcagttcctggggcaaatggacaagcccgacgtcgatttcatcgaaggtttgagccctgcggtgtcgatcgatcagaagaccacgaaccgcaatccacgttcgactgtcggcacgattaccgagatttacgattatctgagattgctgtttgcccgcactggcattccgcattgcccggaatgcggcgcgttggtcagcgcacagacgccgcaacagatggtggacgcgttgctgcagtatccggagcgcacacgattccagattctcgcgccggtcgtccgtgggcgtaagggcgagttcgaggatctgcttgaactcttgcggggcgacggctacgcacgagcgctgattgacggcgaaatgaagcagctgtccgacgacatcaaactcaccaagcagaaaaagcacaccatcgaagtggtggtggatcgactggtggtcaaggacggcatccgtcagcgtctgaccgattccattgaaaccgcattgaagctcgccaagggtatcgtggtggccgattttgtggatttggatgagaaggatcctgaccgccgtaagcctttttccgaaaaacgcgcatgcccgaacgggcatcagcttgaacttgatgagattgagccgcgcacgttctcgttcaacgccccgtacggtgcctgcccggtatgcacgggcatcggatacaagctggagattgatccggaactggtgattcccgatcccagcaagacactgaatgagaacgccatcgaaccgtggggcatgaccaaaggcaccggcgaatattatcgccatgtgcttgaggggctcggcgatgagatgggtttcgatctcgacaccccttggaaggatcttccggaagaggcccgtcaagccattatgtatgggcgtgatttcaaggtgcaggtctcgtatcgtaaccgttggggtcgtatgcgcgaatattccaccggtttcgaaggcgtggtgcgtacgctgatgcgtaggcatgacgagaccgactccgatcagatgaagcagtattacgaatcgtatatgcgtgaagtaccttgtcaggcatgccaaggccgtaggcttcgtccggaagtgctggcggtgaccgttggcggggaatccattgccgatgtgtgcgacatgtccgctgagacaagcctcgcatggatggacggcttgcagcttgaagggtcggccgcgcagatcgccggcgaggtgttgaaggagattcgtgcccgtcttggattcctcaacgacgtcggactgaactatctgacactgtctcgtgccgccaaaaccttgtctggcggcgaggcgcaacgtattcgtttggcgacccagatcggttccggtttggtgggcgtgatgtatgtgctcgacgaaccatccatcggtttgcaccagcgtgacaatgagcggctgatcaccactctgcatcatctgcgcgatcttggcaacacgctgatcgttgtggagcatgacgaagacactatcaaaaacgctgattgggttattgacatcggacctggagctggcgagcatggcggcgaagtgatctattccggtcccgcgaaaaagctcgttgacgctccgcgttcggttacgggcgactacattgccggccgccgaaagatcgaggtcccgcagtcccgtcgcaaagtacgtaagaccaagcagttgcgcgtggttggagcccgcgaaaacaatctgaaggatttgacggtcaacttcccactgggagtattcacttgcgtgacgggtgtttcgggttccggtaaatccactttggtcaatcagattctgtacccggtgcttgccgacaaactcaacggtgcgcgcatcgtgcccggcaagcatacccgtgtggaaggtgtgggccagtgcgacaaagtgatccacgttgaccagaatccgatcggacgcactccgcgttccaatccggccacctataccggagtatgggataagatccgcacgctgttcgccaaaacccctgaagcgcaagtccgtggatacggtccggggcggttctcgttcaatgtcaagggtggccggtgcgaagcatgccatggcgacggcactttgaagatcgaaatgaacttcctgccggacgtgtatgtggactgtgaggaatgccatggcaaacgctacaaccgcgaaacgttggaggtgaaatacaatggcaaatccgttgccgacgtgcttggcatgccgatcgaagaggctgcccagttcttcaaagcgtatccctccatctcccgctatctcgacacgcttgtgcaggtcggacttgggtatatccgactcggacagcctgctccaacgctttccggcggcgaatcgcagcgtgtgaagcttgcgaccgaattgcagcgaaggtctacgggcaaaaccgtgtatattcttgacgaacctaccacgggtttgcattttgaagatgtgcgcaaactgctgcttgtcttgcagggattggtggataagggcaataccgttattgtcattgaacacaatctcgatgtggtcaagtcggccgattggatcatcgaccttgggccggaaggcggtgacggaggcggcaccatcgttaccgaaggtacgccggaacaggtggctcaatgcgaacagtcttggaccggcaagttccttaagggcatgctgtgagcgcacccatcgagcggcacagccaggaggtttggcgcaaaaccgccgaacagttgaacggcgacggtttcagtgtcggtggtgatgattctcccggcaaagacgtaaacaagaacggcgcgcctctgctgggggattcacgtgacctgtttcgtccgaaaacatccgacattccggcgcagccgggcgtatacaagtggcgagatggtgaaggcagggtcatttacgtaggcaaggcgaaaaacctgcgcaaccgtttgaccaattatttccaaccgttgtatcagctgcatccccgcactcaaaccatggtattgacggcccgtaacctggaatggacggtcgttggtaccgaacttgagtcattgacgttggaatacacgtggatcaaagagtttgacccacgattcaacgttgtgttccgcgacgacaaaacctatccgtatctggcgatctcatccggtgaacgcgtgccgcgggtgtgggtgaccagaagccgcaaacgccgcgatacaagatatttcggcccgtacgccaaagtatgggatctgcgtcacagtctcgaccgtctcctcaagacttttcctgtgcgcacctgttcgcagaacgtttatcataaggcggaaatcactcatcgtccatgtttgcttgcgtccatcggcaaatgttcggccccttgcattggacgtatcagcgtcgaggaacaccggaagatgtgcgaacagcttattggcgtattaaccggtcgcatcggcaaatcgtatatcgcacagctcacgcgtgaaatgaaggaggccagcgacgagttggagttcgagaaagcggctcggttgcgcgatcagatccagatgctatccacagtggttgagcagaatgccgtggtgttcgattccgatgtcgatgcggatttcttcggcgtcgattcggacgagctggaagcttccgtgcacgcgttttacgtgcgtgccggttccatccgaggtgaacgcaattggagtgtggaacgggttgaggatgtgacggatgaggagctgattgccgaccttattgtgcaggtgtattcggaaaccgcaggggagacgattagggcttcgcagtcgactgttgtcaccgaacaacgcaatgccatcggatcgacgcaaatcgtgacggcgaccgatgcggtggcacgcgcgcaagctaccagggaacgtaacgagcggcaggatcagaccggtcgtgcggatttgttggctcctatctctccggtgccgcgcgaggtgattgttcccatcgagccggcccggcgtgaagagcttgaatcatggcttagcggattgcgcggtggtgccgtgagcattcgcgtggccagcagaggggataagagacagcttctggaccgtgccaacgataatgccaagcaggcaatgcagcgcagcaagatgagtcgcatcagcgatatgggcgcccgcagcacagccatgaatgatgttgccaaggctttgggacttgaacaggctccattgcgcatcgaatgctacgacatttccaataccgtcggcggagcgttccaggtcgcttccatggtggtattcgaggacgcgattgccaaaaagtccgaatatcgtcgtttcgccattcgcggagcggacggacagggtgcactcgacgatttgagcgcattgtacgagacgctgacgcgacgattccaacatggcaatatcgccggtgactccggcgaaagcatggataatgaacgtcgggcatccgagcatggtgaccagactcatgaaccgactgtccagcagaacaccaatcggcatcatttcgcatacaagcctaatctggtggtggtcgatggcggcaaaccgcaggtcatggcggccgcgaaggcgcttgaggattgcggtgtggatgacgtggccgtgtgcggattggcaaaacgtttggaagaggtgtgggtgccggatgacgactatccgatcattctcaaacgtcaatccgaaggcatgtatctactgcaacgcgtccgcgacgaatcgcatcgttttgccatcacctatcatcgtcagaccagaaggaaaggcgcgttgcgttccgccttggacgatattccaggcgtcggcgaggcataccagaagcgcctactgagccatttcggctcggttcgtgccatgcgtgaggcggatgtcgaggatttcgagcaggtcaaaggcgtcggaaaagccaaagccgcagccatttaccaagcgttgcacgcccacgacgggcaaccgtcgacggaaaatgccatttcgtcgaatagtccgaaagatgaaatggaataagattgggtagcgaaaaaagacaatcggattgctagcatgatgacggtgaatatatagggagggaatatgaccgaggtcaaccaccggtgcgcggttctgggcaagcccatcgcacattcattgtctccggtgctgcacaatgccgcttatcacgcgttgcatcttgacgactggtcgtacgacaagcatgaggtgggcgagcctgatcttgagggctttcttgaatcgcttgatccgacctggtcgggactcagcctgaccatgccattgaagaaaacgatccagccatacggaacaccgtgcaatacatgggccaaagagcttatggttgccaataccgcggtgtttgattggaccaaaacctgcgtcaatggcaattcgaacatccccttcatcaggctatataacacggacgtacgcggcatcgaactcgctttcgaacactcgtatcagacacgtgcgataacgccgaagacggaccgttcgggaacggccgtgatcatcggcaacggcaacaccgcaacgtcggcgttagcggcatgcgtggagatgtctgcgatcggacatgtcatcgttgtggctcgccatcctgagaagaacgccgatctcaagccacttgccgaacggtatatgccatcggaacagccgatcagcattgtcggcatggaccacgccatcgaagcgttgcgccaggctgatgtggcgataaacaccattcccggattggctgcggacggtattgccgaatcattgagaatgccaggtgtgcgcatgcatggaacattgctcgacgtcgtatatgacccacgccctaccaagctgatgcaggcatggcgccaacagggaggaatcgccattggcggcgagcagatgctgttgtatcaggccatggtgcaggtctggttgatgacgggaatctgggatgacgatccgccgagcggtatggttgatcaggattgcaccgcgcgtttggaacaagccatgcgcatcgcgcttgaggaggctctgtgatggcacagaaagacatcgacgtacaggcgaatggcacgcatgccagcgccccttcgccggctgaaggttttgaagtattgctgatcaccggcatgagcggtgcgggccgttcgcatgctgccgacagcattgaagacatgggttggtatgtggttgacaacatgcctccaaaactgctggtgcccttggtggacatgatgaccacgggatccaatattcacaaactcgccgctgttgtcgacgtgcgttcccgcgactatttcgatgacctgtccgcggtgctcagccatctggacgatcttggtgtgaaaacgcgtatcctgttccttgatgccagcaacgaggtgctgatcaaacgatatgaatccgtacgcaggcctcatccgttgcagcagggcaatcgactgattgacggcattctcgaggaacgagatctgcttgagaatctcaaagaacgtgcggacatcgttatcgacacgtcatcattgagtatccatcagctgtccacgaaattatatgaggccatgctcggatccggtccgaccacggtttccgtgcacatcttcagtttcggtttcaaatacggtattcccatcgacgccgactttgtggccgacgtgagattcctgccgaatccattttgggttcccaggcttcgctcgctgaccggacgcgacaaagaggtgagtgattacgtactttccagcgaaggggccgcggacttcctcgactcgtatgaaaaggcgctttcgattgcgattgaaggatatgcgcaggaagataagcattatgtgactattgcgattggttgcaccggaggccagcatcgttctgtcgcgatgagtgaggctttggctaagcgactgcgtgcgagggggttgtcggtttccgtttccgcacgcgagcttgataagcggtcagcggaaaaatgaccgtattatgagagaatagtatccatatgtaaagaaacctggctgtgattgtccaagatattcggtatcacagtaagccgtggcagtgcggaatgattccgcgactcgcctgaaatttagggaagaacagcaaggtaggaggttggctcttggctcttctggatgacgtcaaaagcgagctggccgcaatcgataacgaactgccgatcgccaaaaaggcgcaggcgacagcgatgattcgattcggcaatggtttgcactcggtggatcaccacattctcgtgcaggtgcagctcgactcccaagatgcggctgcttggctgcaggacaccatcaagaacctgtatggtcatgaagccacgcttactcctgtctctaggcagacgccaaccggcaccgtgcagcgttatgtgattcgcgtgccgaagggcagtacggcgctcgtgctgcagaccggcctgtacagccgttacaccaagaacatggtgcttggtcttccaagcgatatcatcaacggcaaaatcgcgcagatcaagtccgcatggcgcggcgcgttcctcgccaacggacgtctgtccgatccaggcaaggccagctatcttgaaatcgtgtgcccgaaccatgaggccgctctggcactggtctccaccgcacggcgtctgggcatcaccgccaagccgcgtaagctacgcagctccgaacgcgtcaccctgcgcgatcccgacgccatcgaacgtatgctcattcttatgggtgcgccgcgctccgcacgcgagtggaccggaaagcgttccgacggcgaagctcggggcaaagccaaccgtctggccaacttcgacgacgccaacatgcgtcgcagcgccaaggcggctgcggaagcatgcgacaaggttcgtcaggcgtttgagattcttggagatgacattccagacaacctcaaatcggccggccagcttcgtctcgaccatgctgatgcgtcgctggaacagctgggacgtttggccgatccaccaatcaccaaggatgccatcgcgggccgcatccgtcgacttctgcagctcgccgagaaaaccgaaaaggcgcgccgccagtcggcttgattgaatcttttatgcaaaacaccatgcctgttttcgaacagtatggtgtttttgttcgtttgggcttgtattattcgtaaatggcaatatggccattccacgcttacaagcggctaggaaaggatatacatgaagacactcaaggatcttggagatctcaagggcaagcgcgttctcgttcgcgccgatttcaacgttccgctggacggcaccacgatcaccgatgacggtcgtatcaaggccgctctgccgaccattaaggccctgcgcgaagaaggcgcgaaggtcattctgatggctcacctcggccgtccgaagggcaaggtcgttccggaactgtcccttgccccggtcgctgctcgtctcggcgagctgctcggcatcgaggtcccgctggctgaagacacctatggtgaggatgcccaggccaaggtcgccgcaatgggcgacggcgatgtcgttctgctgcagaacgtgcgttacaacccggaagaaaccagcaaggatccggaggagcgcgccgcttatgccaagaagattgctgcgctcggcgaagcgttcgtatccgatggcttcggcgtcgtgcaccgcgcacagggctccaattacgacgttgctgccgatcttccggctgctgccggcctgctggtcgagaaggaagtcaaggctctgtcccgcgctaccgttgagccggaacgcccgctgaccgtcgtgctcggcggttccaaggtctccgacaagctcggtgtgatcgaaaacctgctcgacaaggccaaccgtctggtcattggcggcggcatggtttacaccttcctcaaggccaagggcctcgaggtcggcacctccctgctggaagaggatcaggtcgagaccgtcaagggctacatcgagcgcgctgagcagaacggcgtcgaactcgtgttgccgaccgatatcgtggtgaacccggtcttcccgaagtccgatgaggacatcgctccggaagtcgtggctgccgacgccattccggctgacaagatgggtctggacatcggtccggattcccagaagctcttccacgacaagatcgtggattccaagaccgtcgtttggaacggtccgatgggcgtgttcgaggttccggctttcgctgccggcaccgaggccgtggcccagggtctggtcgacgctaccgcagctggtgcgttcaccatcgtcggcggcggtgattccgcttccgcagtgcgtaacctcggcttcccggaggatggcttctcgcacatctccaccggtggcggtgcctccctcgagttcctcgagggtaaggaactgccgggcctgaaggtgctcgactgattgcttaacgcataaccggaggtgctcccttatcaacaaaaaaggtgggggagcacctcttgttttcactaacccgaaaccacggcgtacgaacactgaatgaaataagaacggaggcaggcaaacacatggcatcgcaacgaattccactggtcgccggcaattggaagatgaacttcgaccatcttgaagccacctatttcgttcagcagctcgcatggaaacttcgtgacatccatttcgactaccgccattgtgaaatcgcattgatgccgtccttcacatcgttacgcagcgtgcaggtgttggtcgaatccgacaatttgaagattcactacggcgcacaggctgtttccgtaacatcgcagggcgcgttcactggagatgtgtctgccgatatgatcgcccacctcggctgttcgtatgtgattgtcggacattccgaacgacgaaagtaccatccggaagatgatgcgaacatcgtggatcaggtacgcgctgttttggcggccaaaatgcagccgattctttgcgtcggcgaaagctacgaggaacgtcgcaaaggcattgagcttgatttcgccgtggggcaggtgcatgacgtcacacgcgatctttccgacgaggaagcgtcgcgtctgattgtggcgtatgagccgatatgggccatcggctccggaatggtggccactccacaatccgctcaggacgcggccaaggcgattcgggatgatttggctgaaactttcggcacgcatgtaggagagtccgtgcgcattctgtatggtggctccgtctcctcaaagaacgccgaagaattgattggcgagcccgatgtggatggattccttatcggcggtgccgcgctgaacgtggatgagctcaccagaatctgccagctcaccatgaatgcgacagtatgatgctcgcggagtaatgtttttatcgagttggcctttcaaggtgtggtcattattcgattttctcaataccttgcgctattgttaacagcagtgtttacgaactggaggttcactcgtgtccgctatggccatcgtcaagcttgtgctgcagattattcttgttattttcagcctcttgctcaccctgttgattctgatgcacaagggtaagggcggcggtctgtccgatatgttcggcggcggtctcacccagaatgcgggttcttccggtgtcgcggaaaagaacctgaatcgttggaccgtcatcatcgcggtgctgtgggttgccatcatcattgccctcggtctgatgacgaagttcgatctcatctgattggctttttgcttcggcccatgactggattacagtcatgggccgaagtgttttttatcgtagtattgtctacaacatacgagctaaggattgatttgacgtctttgaaaatcgagaaaacccaagaaaccacgatggtcgtcgcggatttggacggtactttgctgcatgatggcgaaacgttcgaggaacgttttcttacacaacgttccatcgatgtgattaaccgcatgcacgataatggcgtgaccttcgttgtggaaacggcacgtccggtcagcacatgcttttcgttcgtggaaaaactgccggttgatgccgttgcctatctcaatggagcattgatcgatttcaatccagcctcatcaaattatgaaatgctcacttcgccgatgctgccggaagacggccatctcaagaaaatcggattctcctcacagcgagcatgcgaagtctgcaagaatctgttgaatgaactgcccggtatggaagtcggcattgtcatggatgatgtgagatacaccaatttcgatgttacgaaatattggaaaacacagacctggcgatacactgacttcgacgatgttcctgaaggcatcgccgataagctcattatcttccctaacgatgagcagcggaatcaggtcggttctcttgtgcccaacgattttgacgtacatatctctgagggatcgctgtggatgttgatgaatcctcaagccaacaaggagcatgcgttggatttgctggcagaacattttgagacgccgatgagcaataccgtctcattcggtgacgatttggtcgacattgccatgctacgtaaatccggcaggggagtggcggtagcgaacgccaatccggatgtgttgaacatcgcagatgaaatctgtccatctaataatgatgacggtgtggcgcagtggattgaagataatctgctgtgatgtctcgtgatattcaagagttacatgagttgaacttcgtgaattgaacttttgtcgcaaaaggatgcgaaatagttacatttgatattgaacttccgtaatttcgttagttggtttgtgttaggatttgaactagcgcttgataaaaattgaactgaaaggactagtatggcggaatcgttctccaaccggttgaacgtcgctatggcgttccgcaatgtcaaacaaattgactttgtgcatgctgctgagaagttcaatatcaaacttggcaaaagtcatatgagtcagtacgtgagcggcaaaaccgtgccgcgtgccgatatcgcccattttcttgcggcttttctgcaggtcaatgaggactggctgatgggaaaggacgttcccatggagcagaacgtcgccaccttgcccgcaatcaagtctgatgaagcccaacatgatagcaatcctgcatcagcgcaatcaacagaaggaaagactatgcgcacctttacgaaatctcataagctcgacaatgtgctctacgacgttcgtggtccggtggcggacgaggcagcacgcatggaagccgcgggaacgcatattctgaaactcaatatcggcaatcctgcgccattcggattccggactccggatgaagtcgtgtatgatatggcgcaacagctccctgaaaccgaaggatattcaccgtccaagggtctgttctcggcacgcaaagccatcatgcagtatgcacagctcaagaatattccgaacgtctccatcgatgatatcttcaccggcaatggcgtcagcgagctcatcaacctgtcgctgtccgcgttgctggatgatggcgacgaggtgctggtgccttcgccggactatcctctgtggaccgcctgcgtgaatttggctggcggtaccgccgtgcattacatctgtgatgagggatccgaatggtatcccgatatcgacgatatccgctctaaaatcacggataagaccaaggcaattgtcatcatcaatccaaataatccgaccggagcgctttatccaaaggaactgctgcaacaaatcgtcgacattgcccgagaacatcagctcattattttctccgatgagatttacgatcgtttggtcatggatggactggagcatatttctatcgcatcgctggctccggacctgttctgtgtaacgttctccggtctgtcgaagtcgcatatgattgccggatatcgcattggatggatgatactttccggcaacaagcgtattgcgaaggattacatcgagggcttgaacatgctggcgaacatgcgtatgtgctcgaatgtcccagctcagtcggtggtacagaccgctttgggcgggcatcagagcgtcaaggattacatcaagccaggtggccgtgtgtacgagcagcgcgaactggtctatcagatgctcaacgaaattcccggcgttaccgcagttaagccgaaagcggcgttctatatcttcccgaagctgaacgtcaagaagttcaatattcactccgacgagcagtttgcgttggatctgctgcatgacaagcatattctgatcagtcatggcggtgcattcaactggcagaatccggatcatttcagggtggtatatctgccacgtatcacgatgttaaaggaaaccgtaagtgagatcggtgatttcttgagcacatatcatcaggcatgatgaccttgattgcttgaagggctttcatggtgtgaagtacgcgcagcatcgcggcactccgtccccaaatacttatagttatactgaccataagtagggttacgatggctccggccttagggccgagccatcgtttcattgtgaaaggggatattgtgaacgatttgctcaaaggaatcggcaacgtcgtcaatccgaagcgtgtgttccgcgagctgactgacttcaagccgggggagtttgtcctgatcgcggtcatgctgttggcgcagttggtgtcattcttcgtgtccaaagattttccgcggcaggttgaattggtctgatttccggcctatgcatcgtgttcaatctcattctcgtcgaccgtgggcgactgaccaactatctgtggggcttcatcggttgtgccacttggctgatcgttgccatcatgaaccatctcgtcggagacatcttcgctcagatcttctacgtcaccatgcagttcgtcggcgtatgggtgtggcagcgccagcttgatcgtcaggaaaaaacgagtatgaggaagtcaatgcccgcatgttcacatggtggcaaggcattctcgccgtcatcgcaaccatcgtgatctatctgattgtggtattcgtgtcgagccatactggcggtgtacaggttcggcttgacggcacgctgctgccgcttggtatcgtcggacagattctcatgacatacggctaccgcagccagtgggtcgcatggattattcttgacgtgatcaaggtggttatctggttcaaccagctttccgccggaggtcctggcgccatgtcgatgttcgttcttcaggtggtcatgttggccaacggtttttacggcgcatgggtctggttccacaagagcagcactatggccgtatcggatgatctgcaatcaagtatttgcacggaaagcataatcgcaaatggtggccgctgatcaatcaatcgttccgtcgcgagttcacaacgatcatattggttgttgggccggcttccgtcggcaaaaccacattggtgacacgcttgtcgaaattgtatgacgctccgatcgcggtcgagtatgcccgtgaatttgaggaagcctgcaatgttgacgatgatgaacttaccgctttcgattacgagcggctgattctttccaagttctctcagaacgagcatgcaatagcatcgcatgccaatcatggcatcgttttttcttgatactgatgccatggttacgcgtgtctatgcggaacactatctgccggccgatgagaacgccaagctgcaagccgacattcgatatggtgattgaacaggagaagcctgatctggtgttgctgattcctccgatcaccgaatatgtggatggtgggttccgtgcaatgcggtgggcttcggatcggtatcggttccatgagactttggtacgcgtcattcaggagtcaccgtatgccgaccgtgtggtgacgcttgacaatccaacttttgaagggcgcaaaacgcaggcgattcaagcgatccgccaggccactggttttacgcctcgtaccggaataagctgaaaacatgtagagcaatagcagatcccccctgccagaattctggcaggggggatccttagcttagatcgctaacacttaagcaagaagctcagccgttgacgcggtcgatgccagcctggacgtcagtaaggacggaatcccaggacttgatgaaggaagcgacgccgtcggcttccagcttgtcggtgacagccttgaagtcgatgcccagctcagcgagcttggccatgatggcgtgggactcttcgtaggtacccttgatggtcggagcgccgttgccgtgatcggcgagagcgttcagggtcttctccggcatggtgttcacgatgagcggggcaacgagctcgtcaacgtagacgcaatcggaataggccgggttcttagtgccggtggaggcccacagcggacgctgcttcttggcgcccttggcttcgagagcagcccaacgcggatcgttggcgaacttgttctcgaacagctcgtaagcgaggcgagcgttggcgatagcggccttgccctcgagagccttggcctcatcggagccgatctcctcaagcttgttgtcgacggcggtgtccacgcgggacacgaagaaggaagcgacggaaccgatgtgcttcaggtcatggccgttggcgtcagcctgagcgatgccttcgatgaaggcatcgatgacctgctcgtaacgctcgagcgagaagatcagggtgacgttgacggagatgcccttggccagggttgcagtgattgccggcaggccttcgagggttgccgggatcttgatcatggcgttcggacggttgaccttctcccagagctcgacagcctgctgctcggtggcttcggtctcgtgggccagacgcggatcaacttcgatggagacgcggccatcgacgaaatcggtggcttcggcgatctcacggaagatgtcggtggcgttgcgcacgtcggtggtggtgagctcgcggatagcggtctcaacgtcaaccttgccgagctccttgagctgtgcatcgtacgggccgacctggctcagagccttctggaagatggacgggttggtggtgacgccaacgacgttcttgtccttgatgagctcctgcaggttgccggattcgatacgggtgcgggacagatcgtccagccagatcgagacaccggagtcagaggtgcgctgagttgcttcagtcattgtttttctccttgatacctttttggatcaaatctttatttattgtgcggtaaaaggggagaggcacatgcatcatgcccctccccgtcgaatcacttggcggcttcgacttccgcaatggaggccttggcggcttcgacaacatgctcggcggtgatgcccaggtcgatcatgttctgagcaccgtcgccctgcaggccgaactgctcgatggaaaccggcttgccgtaggagccgaggtacttgtaccacggcatggcaacgccagcctcgacggagacacgagccttgacggaggccggaagcacagcttccttgtactcggcgtcctgctcctcgaaccattcgagggacggggcggacacaacgcgagccttaatgccttcaccagccagggtcttggctgcggagacggcccactgcacttcggaaccggtggccatgataatgacgtcaggggtgccctcggtgtcgacaagcacgtaagcgcccttcttgacgccgtccttggccttctcagcggtttcggcaagaaccggaacgccctggcgggtcagcaccatggctgcaggcagagtgttcttcttctcgaagaagtaacggtaggcttcggcggtctcgtaagcgtcggccgggcggacgacctcaagctgcgggatggcacggaaggaagccaggtgctccaccggctggtgggtcggaccatcttcgccgacggcgacggagtcgtgggaccacacatacaggttcggaatctgcatgagagcggccagacgcacagcggaacgctcgtagtcggagaacatgaagaaggtgccaccgaacggacgggtatgggagcccagcaggatgccgttggtgatggtacccatggtgaactcgcgcacgccgaagtgcagctgacggccgtacgggctgcagaccggccactgcttggtggcgcactcggcaggagcgaaggtggcagcgcccttaagatcggtcttgttggagccaccgaggtcggcggagccgccccagagttccggcatgacagcggcgatggcgttcagcacggaaccggaagcgccacgggttgcaacgcccttgccgacttcgaaggtagcctcgaggtcatcgatggccttgtcgaagccctccggcagttcgccggccttgaggcggtcatacagggcagcgttgtccgggttggccttgcgccatgcgttgtacttctcgtcccattccttgtgggcttcgaggccgcgctcggcaaccttgcgtgcgtgagccagagcctcttcgtcgacatggaaggactcttccggatcgtagccaagcagttccttgaggcctgcgacggcttcggcgcccagcttggagccgtgagaggacggatcattggtcttgcccggggtcggccatgcgatcagggtatcgaccttgatgagcttcggctggttcggagcggcctcgcgagccttggcgatggtgtcggccagaccctcgacgtcctccttgtaggagccgtcaggctggatgaagctgaactcgtcggtgtaccagccgtaggcctggaagcgcttgagcacgtcctcagccagaaccagattggtgtcgccttcgatctggatgcggttggcatcgaagatgacggtcaggttgcccagctgctggttggcagcgagggaggcagcttcgccagagataccttcttcgatatcgccttcgccgcagatgacccagatgttgtggtcgaacggggattcgcctgccggagcttccggatcaagcagaccacgctggaaacgctggccataggcgaaaccaatggcggaagcgaagccctggcccagcggaccagtggtcatttcgatgcccggggtcagaccatattccgggtgacccggggtacgggtgtcagcaccaccgcggaagtccttcaggtcatccagagtcaggccgtagccggagaagtacagctggacgtactgggtgagggaagcatgaccgccagaaaggatgaagcggtcgcgaccttcccaattgggatcgttcggatcatgcttgatgaaatgctggtacagagtgtaggcgataggcgccagggagacgggggaacccgggtggccgtgtcccgcacgctcaaccgcgtcggccgacaggaccttggccatcttgatggcgcgctcgtccagctcggtctccttgaattcggtcatggattactttccttccaattggtcgggccgcgtatccggcttgtgccgagcgctcgacgccctcacattgcgttttccatagtagcgatgtgaggtgacgttgtggtggatttttggcgtgttttggtagtttgtgttctgttaacgctcacagttaacattctcgtgcgattgctctgttcgattggtggtatgacgagcatttcgggagattgctatcgggaaaaacgagaaacgagtactctggaagcgaacgtattagcactcgcacctcgcgagtgctaatacaatgggagaagtatttacggaagacggtttctcctaatatcgcagatattccgaaaaccggctcccgctgaatcgtatcgtgtatacataaagaggaggcacgcatgacgcagtcaagacgtatgttggtgctgcgtgccgtcgtcgaggactatattcgctcgcaggagccagtcggttcgaccaccttgaccaaagatcatgatctgggcgtcagctcggccaccgtccgtaatgatatggccgccttggaagatgagggatatcttattcaaccccatacgtcggcagggcgcataccaacggaaaaagggtaccgatacttcgtggaccgcttggccacagtggtgccgatgtctgaagcgcaacgccgtggcatcaacagttttctgtcgggatccgtcaatctgcaggacaccttgcagcgcgcagcccgccttctggcacagatcaccggtcaggtcgcggttgtggcggccccgtcgttggcgaaatcgacattacggcatatcgaaatcgttcccgtatcaatcaacaccctgttggccgtcgtcatcactgacaccggccgagtggcgcaacatatactcaacgtttccgagttgccggacaccacagtgctgtcgcatctggtcaacgaaatcaacgcgcagtgtgccagcgtttctttgacacgaaccgcggactatgtcaggcagatgtcatcccgcaaagaataccgccccatcagcaaactagcggaaacgcttgctcaagctttcgatggcatggccgacgacgagcgcgcgagcgaactctatatggcaggaacctcacgactcgcgcaccagcgtgccgtggccgatcttgcaccattgttcgatgcgctggaagagcaagtcgtgctcatgaaactcatgagcacgttgagcgaaaccacgcaatccgatggagtcggagtggccatcggctccgaaacgcacacgcccggtctgctgcatgcatccgtggtgaccagcgggtacggtcgaacctcggcaaccgctgacgacgtaacaaaaggcgagactgcggaggagcaggggagagagacaagcaatcacaccactgcagcgcaggattccaccgagcccatcgccttcgtcggatccataggaccgacgcatatggactatgcggcgaccatggcagcagtgcgtgccgttgccagatatctgaccgcattcgtggctcacgacgaaaaccaaaacaacagctgaccccgccttatggcacaatgacacgcgaaaagcaatagggagaaagaacaaccgtgacggactattacgaagtgctgggcgtagaccgctccgcaagcgacgacgagatcaaaaaagcttatcgaaagatgagccgcaaatatcatcccgatatcgcaggtccggaattcgaagacaaattcaaggaagtcaataacgcctacgaagtgttgtccgatccacagaagcgtcagatgttcgacgccggcgtggacccgaacgatccgaacgccggcggcatgcatggcggattcagcggcggattcggcgacatgggtgacattttcaacatgttcaccggaggtgctttcggcggtggcaacggcggtccgacccctcgtacacagccgggacgcgatgcactggccacagtgaccatcgacttgaagactgcggtgttcggcgacaccgcacatgttgaaatcaaaacgttcggtctgtgccaggaatgcgccggcaccggctgccagaaaggtacccagccggcacagtgccccgactgccatggtcagggctacgcacagcgcgtggtgcgcaccatgcttggccagatgatgaccaccgctccatgcgagcgttgcgagggacatggtaccgttatcgaaaatccgtgtccgtcctgccttggtcatggtcgtgtgcgtatcacccgtaatgtcggcgtgtccgtgcctgccggcgtgacgaacaatacccgtctgcgtctcgctaatcagggcgaggtgggtgaaaacggcggtgttgccggcgacctgtatgtcgacatccgcatcgctcaggatgacaccttcactcgcgacggtgatgatttgcactgctggatccaagtgccgatgagctgggccgtactggggcatgatctggaaatcgacacgttcgatggcaagcagtctgtgagagtgcctgcaggaagccagcctgacgacactgtgaccttgaagaatctgggcgtcacgcatcttaacaacaagagcgagcgtggcgatctggtggcgcatatcgcagtgaagattccgacaaagctcactgacgacgagcgtgccttgatggaacggtttgccgaaaagcatgacacagatgcccaacatgttgcggtaagcgcacgcccgacttccggaacgaagaagggcttcttctccaagctgaaggatgcactgcgctgaatttccctatcctcatgtcgtacatccgatgagaaaacgttagatcgcatatcaaatagccggttgcttcaaaaacgaagcaaccggctattttgtcaatgtttctgctgtagcaagcggattgcctcacgcctacaacagccaatcattaggcatatctacgtgtttatttgagcaatgaccggcacatagcgcgatactggttcacatagccaccgccgaagaacacgcagtggcctgcgatggggtagagctgccacaatgtggtgcgctcctgccatcctgctttcagcggatgtacggactggtatccgtcgagaatgtcccgcaagtacgacatgccgaataggtcaagcatggcgagatcctcttcacgatgcccgccgtgcgcggctgggtcgatcagcaccgcttccacggatccggaatcggccgaccacatgacattgccgctccacagatcgccgtgcactcgtgctggcttgtcattggccgccttgcccagtatttcaggcaacgcttcaatgacggcctcagtcagttccatatcgtaatcagtgagttcacggcgcttcataccaagctgtaccatcggacggagcctgccttcggccaaatatgtcgccacatcatcccattcgcctgcgtccatgggaacgggatcctgcaaggggccgaaataacaagttcccgtatatccggctggggcagatccaaagtaatcggctccggcatcatgcatacgtgcgagagcagcgccgaaatcatgcgcggcctgcaaagtcggaccacaggcgttcactcgttcaatgttgagataatccttgccccagtcgtacacgtctaccacacgtggcccgcctttggattgcgcttcgccaagccactgcaggccacggccctcgcattcgaagaaaccttcaggactgaatgccctgctcttgcgatatttgctcatgctgcccgacctttccttgcatgatccgccacatttgcgagaccttatggaatcgttagtgaagctccgatgggttttggcaccattgtgtgcatggtttgagacaactcaaggatccatagcgaaaaattagacccctctcgctagtcttggatgcggaaaagcagacgaaaccattgatacatataaaagagggttcatgaatttcttccaagcgattttccttggtctggtgcaggcattgaccgagtacctgccagtttcttccagcgcgcatattcgcattatcggcgatttgatgctgggatccgatccgggcgccgcgttcaccgcaatcatccagatcggcaccgagcttgccgtgattttgtatttccgacatgacatcatccgcattcttggagcatggttcggctccctgttcggcaaagaaggcaaggatttcaaaagccgtatgggagcgcacaatccagacacgcagatgggctggttcatcatcctcggcacgatgccgattctgattgccggcctgctgttcaagcatacgatcgaagggtcactgcgtaatctgtggatcaccgtcaccgtacttgcattgttcggcgtgctgctgtgggtggtcgacgcccgttccaagcaggtcaagaccatgaaggaaatgacctggaaggatgcgctgatcttcggcatcggccagatgctcgcattgattcccggcgtttcccgttctgggggcaccatcacctttggacgcgccatgggatacacccgtgaggcagccgttcgagtgagcttcctcatggccattcctgccgtgttcggcgcaggcattctggaagccgtatcggccgtcaaggacgttgccgcgggggatgccggtatgttccccggctggggtcctaccattgccgcagccatcgtggcatttgtggtcggctacgtggtgatcatcggcttcctgaagtttgtttccaccttctcgtacaaggcattcgccatctaccgcatcggcttggcgatcgtcgtggcattgctgctgattaccggcgtgctttcgccgctggaagccgcagctgcagcgtgaatctaattcgataatcgaataacaaaaaagtcgggccgatcatcctgcgatggtcggcccgacttatatattcactgcttatcgccaatcacaacttaattgccacgcaagaacgattcagcctcacgaatcagctcttcgcaagcgggcatgccattcgacgcgatacgttgcgcttgagcgttcaaatcgtagtcgcgttccagacaggcaagataatcgccggcatgcgtctgctcgacaatctcgtcggcagccttgcgccattcggcggcttttctgttcaaatcaccttcagtcagcggatgctcaagtaaaagagacaatgcgcgaaccaattccagcgtgccctgcaagcactcggtattcgcacagtaatggggtacggacacccacatggatgtggtatgaaatcctgcgtccgccgcaaatgcgtcaagaatgttggggatgcccacagggccgttatattccttgtcgggttcgctttcgcagtcatttttggaaatgtcaagcggcaaaggcctagtgtgggggcaatcgtcgaacatggatccaagcgtgacgataccgctcacatcgtagtcttctgcgatgcgcaacgtctgcctgcagtattcctcccaacgataatttggctcgggggcgatctgagcgagaaaatgcagcgagggggagactgcaatgtcatagaacgtggtctgtggccagatgattcgtttacgaccttgtaccgagcaaatcatcggacgggctacctgatagtcgtagaaaccctcattgtcgatatgatgcacctcctgtgaatcatatcgcgacacaagatgccgtatgacgttcgtcgcagcctggcaggcgtcattccacccctcaaacgcggagatcattattgtctcgcgttttttcgtctcctcacacatgctttaaatgtataacgaaatcatatttccgcaaacacgcttccgccatcggtgaatgtgacgagcagggcatcccgatctagacaacagcatctcaaaatacccgaatatcaagaaagctcaaaacctttttcggtagataaaagccctttgaaaacagcaaaacacgaacacgacacgcggacttgcaaattttgagaatgcggatatagtagatactcgtgctcaggcagtagtactgcggagaacatgcggacatagcttagttggtaaagcgcaaccttgccaaggttgagaccgcgggttcgagtcccgttgtccgctctaaggttccgattgattatcgacctttagggtgggttagccaagcggttaggcagcggcctgcaaagccgtatagacgagttcgactctcgtacccacctcttgttgtgcttgacgtgtgcgagtgcgacgcatgacccgggcggttggcgcagaggtagcgcacttccctgacacggaaggggtcacaagttcgaatcttgtatcgcccactggaacgtgagttcctatataacccatcatcgggtgattggcgcagcggctagcgcacttccttcacacggaaggggtcataggttcgattcctatatcacccaccatcgggcggcacgtcgtgtcgccttttttgttggtttcgttgggtttccgccgtttcgtgcggcatgtcggaaacgggtggcgcgtggtgttgggtttgggcgccatagcgattcatggcgcctatacttccaggcaacgcaacatcaatcaaaaagtcgagcaggatctcagaggtaagctgggactgccggccacaggcgaaatctattacgtgcagaatcgtccgttgtatcaggagtacgagaatctcgttctgaccacctacgacaaatggttcggataccatccatgatggaacgattttcgacaaggccaacgttcctgcaacagaggagggcggtgattatgttcaccagtatatggtgattttgactgactacaaagaatcggttgatattggatggtatcaaatgtcttccagcaccgatgaacctgatgatctcgttcaggcaggcatcgacgaattccagaattatgagaaccaattcctgaaggatgaggatcttgtacggcctattttgatgctgttgtaaggcatgagttgtctcacagggaaatctgggcgcgctgcggaaccgcgggtccgcctgtcgcgggcaacttgattggagctgcaaccaactcctatgcagtgaaatacatgggtgcggataaatcccagatcgagtccacgcagggagaagactataagatgacgcagcagagcgacgcggtggccgaggccattcactccggcgatgctcctaattcaagaagagccgtctgcaacaaggcattgcgggaaatgatcgacgagcagcgctgaaatcaatccccgcgaatataacttcgaatacagttttaagtccggaatacacactatccgggctttttccgtgttctttcaaggtgtacggctacaatggcagcttgtgagtgacgaagcattgaatctcaatcagccggtcaaagacatggggccgaacgagttgaaggcttatgccaggctcggcaaacagcagcatgacgaggcgaatcgtgagctggaacgccgttggcgcagctatgatgacatgttgccaaacgaccagttcgtgtcaattatcgacaagactgagggataagacccactttacggtgtatgattcgtgaccatgccggtctcaataccggctatttgcaagggtaatgactagaatggcgactatgactgatccgattccaagcgcaggtgaaacgaccatcattggccttcctgcaataaccgtaccggtgacttccaccggagaccgtcctctgacgaaagaggaccttgaaaccatcatgcgtcttgccgatggcacggcattgctgatctcgactaggggagcggtgtcggggtcgcggtatcttcttgacgaggatgagattaccgtcggccgtgatccaagagcggacattcttttggatgattccacggtttcccgcgcccatgcggtgttccgcaggtctgacggcaggtattccgttattgatgcgggcagcttgaacggcacctatgtgaaccgccagcgtgttgatcagcaggagctcaagaatggcgatgagattattcttggcaagttccgtctggtttatttcgacaataaagccgtcattgccggttgatccacgttatgcgggatagactgtgtacaacagcttcgcgcccatgagcttcgcacgaatgctcatgggcgttattgtagatgtcgtaggagagcgtgatgaacgaagcagagccaacaacgcggttgcgtctgcatgtgtcgactgcggtgcagggggagttattccccgcgaccggcactcagccggtgacgcgcggctacaagggtacggtggcttcaaaagtagcaggcatcacttatcgtcaacttgactattgggctcgcagacaaatcgtggaaccttccatcacgccgtcgcatggatccggttcgcgcaggctgtactcgttcaaggacgtggtgatccttgctgtgtcgaaaagactgcttgacgcgggcatcaatctgcaaaatgtgacgactgccatcagttttctgacgcagcgtaccgcggaacaacttgagaatatcacgattatgtgcgacggtcagcaagtgcacgaatgtacggatagtgagcaaatggtggcgttgttgcaaagcggtcgggcggtattcggcgtatcggtgggatctttatggaagcagatcagagagactcttgcccacgaggaatacgtcgatctgaccaccatgccttccatgatgggtggaaaccgacctgttgacgatatcactgcaatgcgcatgagaaagaacttcgaggcgcaacatcagacacgcgccgccgcgtcactgtaacataccagaatgcatgccgtatggttgatgcggactaagacggatgtacgagtcgttgatatgagatagatatgtacagacagacatacaacaggggagcaatacatgtttgatattctgccggcattgctgtggattgtcgcagcggtcatatcgttgaacatttgttcgattactgcaattcgaggaaatatcttctcaaaaaccaagagtgacgtatatccggtacgctggtcaattgtcggattgcatttcacatcgctgatcatcggagctctgccgtatccgatatatacgatgttcaaacccagcttttccttgaaatttcagcatttctacgaacaggttggttggccgtcggcagcactgatgattatgctcatcgccacggaactggtgtttatgtatctgcaggcccgaaacggcatgaaaagcgaaatggaaagaaaactcagccaagccattaaggactagccaaaaagacatccatcgaagcgaaaacgcagccgtgtggaaaaacgtccagcgaagcgaggacgcaccatccatcatgccggtgggttatgtcgagcaaagtcccgaaagggacgtgctggcataacccaccgatgttatgtacagaaaagagcgtcagtcgaaaactgctgtagcttttctgacataacatacattatcggacaaaagtgggagcaggtgcagggggtatttgagatgtacgcgatctctcaaaaccccaggtatgcaaatgtcatcgctggcatgcatacccaggggtttctttgtctttatgcacaagatgatccgctcgtgcatcagccgttatctatcaggcgaaatagtcttcgatggtttgcgcaagctcactaaccgaatcgatcaccttatacgcgccatgttctttcagctcgccaggctcggcataaccccagccgcatcccaagcaatccagaccgcacgctttggctccgtcagcatcggtccaacggtcaccgaccatgagcgccttatcgccagcggcttcgtcaaacccaatgtggtcgaacgcccattgaataacctgatctttgtcgagacgcgaattatcttcgctggcaccgtaaatgccgttgaccatggtgtccaaatggaaatgctcgcaaatcggaatgcactgatactgcggcttgcagcttgcgatcgccaagtagtatccgtcagcacgcagtttggccaactgttctgggataccgtcataaatggtattgttcaaacggcccggaaccttttgacccggattattcggatcatcgaacaccgcttcctgcgcataatacctgcggtagatggcaatgccctcatcgagtaagtcgtccggaatattattgcgctgcaacgactcgacaattgcaggaccaatgaatcgctgcaactcctcatcatcaggcactggataccccagttcctcaaataccttcaccacacaaccaatgatgcccggatcagacttggtcaatgtgccgtcaaggtcaagcagaacgactttcttgggttgcttggtcttctcggacatgagattaatgcactccttgttaaatgctcgatgcaatgtgaactgttcagataacaattatgcccggtcttactgaccgggcatgcagttcaagtgtcgttcaactactggttactcgtagtctggaaaccagccgtcgcgatgcatctgcagacgcttttcaagcaacgtcttcagctcgtcttcagtacggcgttccaatagcatgtcccagtgtgtacgggtcggcttggaaatctcgtcggcctcacgatcctcgtcgccttcacgatgcgcggtcatgccgcaccggcactcccattcctccggaacctccgcgccttcagcgaacggcagaatcgtgcggtgtccctttgggcacacatatgcgacgtcgtttcgcgccgcgaaatccacattgtcatcagattccaacgactttgcgccgatgctcatgcctcgcaggctgcgttctgccatattgcctttgcctccttggattgtctgctctgtctaagctacagaacagttcggacgtgtcttttattccttattcgtctgcttgatgttcgattttagtcgacgccggagtatgcgacgatgccacgattgatgcgatcgtacgcctgttttgcgactggcgccaacgtttcggcacgatccgcaagatacggtccagccacggctatctgctgaagcacgtcggcaagccgtttgccgttacgcacgaaatcgccgcccgtcagatcggtgccgtacagcacctgcgacaggctttcaccttgcgcccaatcgtagacgatatcggtgatgccaaaatcgagttggcgaggcccctcaagcatgtgatcctcacataacatggcaatcgacgcatggacgcccttaagctgcgctgcgcacacggcgacgttcccttgaatgcctccagggtaacgacgcggctctcccccgcctcccctgcgggcttcgaacaccaacgatgcgacgacgctggccaattcacaggcgttcaacccgtcaaatgcgccatcgtcaatcgcctgcgccaatactagatcaagctcgctgtacaaatgccgcaacagctggccacgttccgtgagctgataatcaccatggcccgcggattcccgtaccggctgaagatagccgagattggaaagcacagcgcaaatatgatcaaactgacgtgccacggaaccggttcgcgaatcgtaacgatgctgtacccgttccaactcgcgcatctcacgagcccaacgatgtccccatttcaagtgcttctgcacatcagggcatttacggcatggatggtcgcggtcttcttctctgagtttcttgatgcgtttgtcaagatccataaacgcctggctgcgttccttctgcgtacggaacacctcatgcttgagtttgcgacgttcgttcttctccaaatcactcaaacgcatccgcaaacgcatgaattttttgaaatcgccgaattcacactggaaagcctgctcgtatccttccagagccttgcataaggtttccatctgtgcttcaagctgccatgccgactcgttggcttcccattgcgcaaaggagtggtcaagcgtaacgcgagctgtttcatagtcgctggaattcaatagattgacagccatattgaaggtcggtctgaagcttgagtgaagcggatacactcgtttgctggacaaggcggccgcagtggcgggaacaaaaccatggtggtccaccacaacggcatgtccgatggtgtcgatgccacgtcgtcccgcacgaccggtcaactgggtaaactcgccgggagtcaacccaacatgcccggtgccgtcgaatttctcaagcttttcaaccaccacacaccgtgcgggcatgttaatgcccaaagccagcgtttccgtggcgaagaccattttaaccaagccttcttcaaacaagcgttcgacaatctggcggaacaatgcgaccattcccgcatgatgcggagcgaacccttcttccagggcgaaacgaaattgcgagaaatgcagcgctttcaagtcttcttggctcaactggccttcgaccatctcatcgacgatccgtctgatttgttgcacttcgtcgctggtggtgagttccaagcctgcgttgatgcattggtcaaccgcttgatcgcaaccgtttcttgaaaaaatgaagtagattcccggcagcatgtcaagaaaattcaactcgtccacaaccgcccagcgtcgaggcgtatggcgttcgaccttatgcgggcgatcgtcccatcgtccacctttacctttggccctacgcttatcaggacgtcgctcgcccttgcgccgttccgcctgacgatcaagctgatcaagtctgtttatcagctgcgcattgagtttgaccgtctgttcgccattggcgtcacgccgatataggtcgatgagttctggttcggtatggtcatctgcctgtacgagcacgtgctgctccaacggtaccggacgctgttccgacatgaccaacgtggttttgccacgaacagattcgatccattcggaaaaatcctcgacattggaaaccgtcgcggaaagacctatgatgttcacgtttttcggcaagtggataatgacttcttcccagaccggccctcggaaacggtcagcaagatagtgcacttcgtcaaggatcacataacgaagcgcttcaagcgtcacggaatgctcatacagcatattgcgcaacacttccgtggtcatgaccacaatatccgcctcagagttgatggacgtgtctccggtcagcaatccgaccttatccgttccatactggtcgaccagatcatggtatttctggttgctcagcgctttgatcggcgtggtataaaaggctttgacattccgcgtctgcgccagatagatggcgaaatcggctgcgacagtcttgcctgctcccgtaggagctgccacgagcacattatcgccagcctccaacgcatcgttggcttgcatctggaattcgtcaagctcgaatggcatggatcttgcgaattcggccgcaaccgtgcgctgcttggcctgcgtttgtttgaatgcggcataccgttgcgcgggagacaactccacggtctcattgattttcgacgggtcagtaccgttattacggcgacgatgatgggtcatgattccttaatatggttgggtcaatcgttacaatgacgccattgtgcccactgttgagcatgacggcttcgcttcgcttcatgcctctcaatgactccggcatgggcatccgcataacgatctgcagcatcctttaaaggtctggtaaagaaaggcgcttcattctcgttgttttggggcaatggtttgcccatcgcctcgattcgttttgccgtccgttcacccagcttcgccacgtccttgaatgctcgatagccgtgtaaacatgcgtagacgactccggaaacaaccattgcaagcatgaacagagcgagcaacagccaaatccaccaaggcatagtctctcccccgtcagccttcattctcacgatcgccaatgctcagctcatgctgggcacgggcgacaatcatggtacgcaacgtttcgggagctacggcagtgatatgccgtgcgtgggaaatacagaatgcgacataccaggaatcggacgagacgatcagatgcaccttctcgccctctccgcacttttcgactgttgctcccgacagcccgtcaataaatgacagatcatcctgattggtgacgaacacagctggagttccattatcgaagctccatttgcgcaattcggatgcgggaacgtcgggaatgtcgattttcgcggtaggttcaaccagttcggccttttcaatgcgggaaatgcgaagcacctgccagatgcgaggctttcctgtggccttgttgatcgtggtgtctttcttcacgtacttagctttgtcagccggtgcagcggcagcgacgtcagtccatacggcaacgtagaagactccctcatcgacgaagatcttatctggcgcgacaagcttacgctgggtccttccggcgccatccgtatattccatgtcaagcagcaagctcttggagatcgcgctcttcacaatggagaaattacgcggttccacctcataaccggtcagactcagccaaggcatgtcccccggctcaacatgttgacgaagacggctgtacaacgattcagcctgttcacgcaacttgtccggcagcaacgacgaatgcgcaagatagttcaccgatgcggtaagcatgctcaaatactgctgggagatacctgccaagcgttccagcccaagcgaattcgtggcggaaacaatgccttcagcgtcaagcaacgaccagtcgatgtcaaagaactggcttcctgccatctcaccatcgtcggaaaccgtagtcagcgtgttgatgtctttatgaatgacattgacgaacttcttcagctcgtcatcggacttcggtttgccaatgaaacgttccgcaagttcctcaagcgaatattcttcgccgaggtgcgccgaaaggaacagcatcagacgcagacgacggtcgacttcactacccgtctggaatgcggaatttttcttcggacgccccttgcactcctctgcatcgtcgtcagcgctgttgcggttgatttccatggctgtgacagtggagctatcgcctcctgtggattcgtcggcaggcacgaactgcgtggcggcattcaaacggcggttgaacgcgtcgacagcctcctgaggactgacgatggaagcacccggatgagaaagcacgaacatggccagatcatcggaatcggtgtaggcgacgttcaaatgctcgccgtcaacatctacagtcgccgcgaaacgacgctggtcaacgaccttgaccaattcgtcgggaatggattgcgttcccagacccggagcgatggaatcaagaccaagccctggagtcggagtctgagggacgcgaggcgcggtacgggacgtatgctgcgtctcatgtgcgggagctgaggaaatcgacatggaacgggccagatagttggccgcggcaagaatcggcaaatcctcgtcgccgaacagcagacgaacgcgaggctcatctccaagctgcagacgataggatgcgaaatcctggccttccgacttagatgaatactcaggctgcctcgattcgatggcgatgcccatggccgcaagcttggcacggtcacgctggaattgcttggcaaaagccgccttcgccgcctgatcagccagctccccataggaatcggcatacgccttcacacgctgggcaatctgacgggaagtgagccattgcgggaaagctgaggaaagcacagccaatacatcaagttcgtgcttgccccatttgtcggagaaacgacgccttccgttactgccctctgccattagtcctcacgtctcgttaacgtttcatcttaagtgcctagccggttcaggctctgcacacacctctctatgatagagggttttcgttcagattgtgtctattttacgaaaaaatacagtttttcgtgttgaggctacccctcgaatcagacccaatcatcaggctcaacaccttgcgggccaacgtattcgccattcggaacataactcggctcacttgtgtcggtcagccgcgcgtcaccgaacagtatcacgtccctgccgaaggtccagtcaccatcgatgtcgacggaattggccgcggcaagcgacggaacgccataagggaatctcgtatcgaaatcatggatgttcttgtaataccgcgcatccaagtgaacatccgggaagacgtaattgccatcttccatctcgtactggtccgtcagatggaatcgatcggatcgcatgataaacaaatcgtcggtggttttcaccggcaggaaacgcatacggtcaacgcatacgcaggtagccccgtcgaacaacgtcaccgccgctcccatggctgtttccagctggatgaccggctcgctcgtcggatcggtcggatcgacggtcttgttattgcgaatcaccggaagaggaagcacgccatcatatgcggacagcttggccttcagagcgtcgatacgcacccagatgctgttcgtgttaaaatacggatgcttttcgatgttctgcgcatcatccttatcgtccggatgcacctggctcatctcacgcaacatcaagcggccggtcgccttgtcccgcacgatatgcccgcccttgcgatcagctggagtacgttttgcgacctcgatcatgaatggcgcaccggtattttcgaagtgctgcgccagcgtgcgcgaaggacgtgcgccgagattgtcggaattcgagatgaacaggtatttgaagcccttctcctcgaggacgtccaataggccggattcccaaatggtggagaacaggtcgccatggcctggcgggcaccattcaagttccggatttgccgggaagctgacaggaagaccggtttccgcaccgattttcggttcctgatgctgcacgatttccagaggaatgtcctcttgatggaactttttattggcacgcagcgccttcatggtgtcattcgacgtgcggaaggagttcatcaacgtcaatggcagttccacacccagacgagtgcgtgcagtcagcacctgaccgatgatgatgtcgatgaagcgcatctgacgtgccttatggcgacgcactggcagcaaggacttggcgcaatccaagcccatggacgtgccgaggccaccattaagtttgaggaacgcggttttggcaaaagcatcgacggctttgtcatggttgatggtctcgtagacatcatggaagctaggcactcccaccagaggctcaacatcatcctcacggatccatgtgcttgcttcctcactgcgccaaacctcgtacagtcgtttgaattgcgcaatggccatatcggtcatcccgttgtcccgcatctttgcggcggaatgttcaaatgcgtcctcagtcaatgtctttccctttcgtgcgggcgtcctgttctcatcgtacctaggcaatactacgacaaaattcccatgacgggggcttttggtggcaaaaagggaaaattcttgacaaaaatgacatcccaagaactcttttatcatgtttcgcgaatcgtgcgacacgatgaatttgaaaaatagagcaggttgtgctatgtttcatgttcggtgctttttgcaccgttcggaccatagcgcagtttggtagcgcacttgactgggggtcaaggggtcgcgggttcaaatcccgctggtccgaccagaaaaacccgaattcatgcgatttcgggttttcttttttaggatgtcagtcttacgcatgcaggtaaggggtgattgtcttgaagtcgatggacgcccagccacagtttgacgacgttgacggctttgcccacgtgtttgactcatccgagcttgaggatgagtggaagatacgtctgtcccgggaacttggcgtagcggccagggagcgggcgaagcatgatggcatcacccttaccgaactgacgcgcaaggcgcttgaatgcgacgatctgaatgagaccacggacaccgtccgccctggacgaagaccgaagaacaccgacggtcgagaacagctcggagacgaatggaaaatcaaactcccctatgccatcggcaagatggcacgggagcgcgcgtccgaggaaggcatatccttgagttcgctcgcgcggcgtgcgatcagcggatatctacgtcaacgggatactgaggaacagccgctgttttaagcatgtgacaatgagtcacgcatgattggcgtgcactgatctagcaaatatggatggtggccgcacacccaaggaatggtgtgcggccaccatccatagaaacttacttgcgtttcttcttctctcgaatattcaccgaaatctgaatcggggaaccttcaaaaccgaattcctcgcgcaggcaacgttcgatgtatcggcggtaaccatgctcaaggaagccggtagcgaaaatcacgaaacgcggtggacgcgtcgaagcctgcgtcgcgaacaagatacgcggctgcttgcctccacgcagtggatgcggatgggcggcttggattttacccaagaacgcattgagcttaccggtcggaatacgcttgtcccatgattccagcgctccacgcatggctctggccagacggttcgtatgccatccggttttagccgacagattcacgcgctgagcccacgttacacggtcgaattctgtcttccacaagcgttccattcgctgacggtcgaaatcatccatcaaatcccacttgttgaacaccaaaacgatgcatcgaccggcgtccactgcttggctcatcaccttcaaatcctgatcggaaatcggttgggaagcatcaaacagcaccagcgcaagttccgaacgctcaatcgcggcctgggtacgcaaggatgagaaatattcggcaccagacagcttatgcaggcgacgcttgatgcctgcagtgtcgatgaacagccaatcctccccatcaaccgtcaccacttcatcgactggatcgcgagtggtacctgccaaatcattgaccacagtacgttcctcgtgagccagctgattcagcaaagacgacttgccgacgttcggtcgaccgaccaacgccacacggcgcaaatgggacggagtaaggaaaccggatgttttctcagccttcttcaacgaatccaaggcagcgtcaagcagttcgccaataccgcgaccgtgcatggcggaaatgccatacggctcccccaagcccatcttccagaattcagcggtcaaatattcgctctcacgatcatcaaccttgttcaccgccagcgtgaccggcttgccggaggcgcgcagcatcttgacaatgcgctcgtcggtgttggtaagaccaacctggccatccaccacaagcaccacagcgtctgcaagctgaacggcgatctgcgcctgggatgcgatggcggattcgataccttcgacgtcggcttcccagccaccggtatcaaccagcttgaaatcggtgccggcccattcggcatcgtagctcacacggtctcgagtcacgccgggagtgtcttccaccacagcagcgcggcggccgagaatacggttcaccagcgtggacttgccgacattagggcgcccaacgacggcaagcacgccaaccggcttcgggccggaccggcgttcgccgccaacgaacgacgatccatcgatcagtccttcatcgccctcatccaactcataatcgtcaagattggaagcgtactggcgatactgctgctcttcgatggcatcgtcgacaatgcgcacaagcacatcaagcgtttcgccgaaattcaaatcggaattatcgacggtcagcacgccttccgcggcagatgtgaaattcgtgaccttggaatcagctgcatctcgcgccgcaacattctctgatccggcaccatcagttgactgaccggaacgacgagcctgtcgcacctcttcacgggcggtgagcaacacacgcacttcagcatccggcgcaacaaccgtagtgatgtcacggccttcggcgaccactccggcaccctcagaaaaagagtcagacgcagcttcgcgtgcgatgtacgcgcgttgagcggcaatcagcacgtgacggacgggaatgatgttcgacaccttggacacatgggatgacacttcggaggaacgaataacgtcgctgatgtcttcgccgtcggcatataccttcgaatcgtctggatcgacgctgatgtcgaaatgaccttcggtaaagaactctcccacggtttcggtgaccagttgttcatcgatcgtctccgcgtcaaggtcaatgcccttgttcatgcaccaccatgcgcaggcacgatacatggcaccggtatcgaggtaagcgaaaccgtaatatttggccaacgccttggatgtggaagacttgccgacacccgcaggtccatcaatcgctacacgaatcacaggcccaccgccttggacagggaacgcacctcggtctgcgaaagcacacggtacgatccggatttcagatcgccaagcttaatcgggccgatctgggtgcgtaccagacgcttgaccgggaatccgatcgaaccgaaaatgcgacggacgatacggttcttgccggaatgcagcacaaccttgaccagcgtgctgtcgcggctggcatcaagaatcgcgcaacggtcgagcttgatccaaccatcgtcgagctgcacgcctgtagtgaccagtcggcggcacacctgaccgctgatgcgaccttccaacgtggcgatgtaggtcttctcaacctcgtacttggggtgcatgacgtgctggctgagctcgccatcgttcgtcatgagaatcaggccttcggaatcataatccagacggcccatgtggaaaatacggtcatacttgtcgccgacgatatcgctcagggtgtagcgtcccttcggatcctccatggcgctcagcacacgcttcggcttgttcaaagcgagcgtgacatgattgggattcacgcgaacacgggagccatccacacggacttcctgatgtttcggatcgacgcgagtgcccaattcggtaacaagctcgccgtcgatttcgacacgtccttcagtaatgatctcttcacatttgcgacgggatccgaatcctgcctgagcaagaagcttctgcagacggataccttcattatcgtgtgtgtgcgccttcgcggcgcgggaatatgcgtttggcatcgttctcccaacgtggccggataatacttatagggactgctggtactatggcagtcgtttggcgatttcccaaaatcgcaacttgtccactatatgacagaggaaagactatgactgctgttgaagcaacgcccataaccaaggaagaacaaagcaagccgttgacacttcgtgtcggagcggaacttgtgggaagcttcatcatttgcttcgcgatttatgcgatctgctcgcttggttccgcggtgtatggcattaacatggcgttcatcgccctgttgacgggcatcgtatacgccgccgtcaccgtaatcttcggttccatttccggagcacagttcaatccggccgtatccgtcgccgccatgctcactggcaaaacccacgtgcttgatggcattctgtacatcattgcccaagtgctcggcggtatcggcgcgggtgccgctatccggttccttctgccgacttccgagcaggtgacattcaagatctggatgacaccaacggtcaacggtttcgataagaattccgtctcctactccaccctcggcaattatggagtgaccctcggcatcactctgtccatcgccgttgaagtcgtcgcaggtatcattatcgttgcctccgcactgcgcaccacggacggacacggcgagtccaaaacaaaccacgccgttgccatgggccttgcctacggcatcggcaccgctatcacctatccggtgaccggagccgcactgaatccggcacgtgccacgggcattgccattttcgcacagaatcaaggactgaatgaagagccgctgcaacagctgtgggtcttctggatttgccctgttcttgccgctgcagttgttgctctcgtcgtcatcgtcgccggcatgattggtacgaagaagaacgtgccggatactgtcgagacaatcgataaggtcgaaggcaataccgttcttggcgaagcgtcagttgccgacgggaacgatggtgagcaggatgaacagtcctacgcccaagccaatgccgatgaaagcgtcgaaagcaactgaccgaaccttccatggactgcgctcacgcaatgccagtctgaccagtccagtcgctatggccgtcaccgcaatcgcagcggtggcggcttttgtatatcctgcgaccgcaagcaccgtcgcaacaatcactaccgcggcgacgatccattcgaaccacggtttgccctcatgatcttcggaaacgtaaggatggctcattccggggcctttcatcttgcttgctgtacaacaaccgtaatcataataaaacgtggcgtccgaaaccaatacggaatcggacgccacgttgacccataccctcacatgagaggcggcgtatcagtggaagaagtgacgggtgccggtcacatacatggtgacgccggccttacgagccgcttcgaacacttcctcgtcgcgaatggaaccgcccggctgaacgatagccttaacgcctgcattgatgagaatttccgcaccatccgcgaatgggaagaacgcgtcggatgcagcgacagcgcccttggtgcggtttgcgccatcagccagcgtgttggcgcgttcgacggacaggttcgcggaatcgacacgattcacctgacccatgccaatgccaacagtggcctgatcgtgggcgatcaggatagcgttcgacttgacacagcggatggcccgccaagcgaaaaccagatccttgacggtctgctcatcagcaggctcgccggaaaccagtttccaagcgttcggatcgtcgcccggagcatcgataagatccgtggactgcaccaacagaccgccgtcgatctgacggaactgcgtcttggacttcggcggctcggaaaccttcagaatgcgtaggttctttttcttggtctgcagcagttcgagagcgtcggcatcatagtcgggagcaacaatcacctcggtgaaaatcgggcggacgctttccgccatttccatggtgaccttgctgttcgcggcgatcacaccgccataggcgctcatcggatcacaggcatgtgccttcttgtgcgcttccgcaacagtggcgccaacggcgaggccgcacggattgttgtgcttgaccacggcgacggcaatctggggagcaaaatcccatacggcacgccaagcagcatcagcatcaacatagttgttgtagctcatcggcttgccaccgagctgttcggcatgcgcgaaaccatcctggttcagcggatccagatacagcgcggcctgctggtggggattctcaccgtaacgcagcacgtgggcacggtcccaagtacgagtaaatgcggccgggaacttggtctcattcacttccggctcgtcttcggcggttggctgctcaacggtcaaaggcttcggccagtgctttgcagtccactcgttaatggtggcatcgtaggcggcagtatgggcgaacgccttgccggccagccaacgacgttcttcgagagagaagccctctccgttttcgatgcgcgcagctaccagtgcgtaatcgttcggatcggtgatgatggccacagtggcgctgttcttggccgcaccgcgaaccatggacggaccaccgatgtcgatcttctcaatggtggcagcctcatccgcgccagaacgaaccgtatcggcgaatggatacaggttgacgaccaccagatcgaacggcttgatgccgaacttttccagctgtgccgcgtggtcctcattggtcatgtcagcgagaatgcccgcgtggatatgcgggtcgagggttttgacgcgaccgtcaaggcactccggaaagccggttacttccgagacttccgtcaccttgacgccaagttccgcaagacgcttcgcagtggaaccagtggaaaccacttcagtgccggccttgatgaacgcttcggcaagaacctcgatgccttccttatggaagaccgataccagagctcgccgtatcggtcgattcgttgttgtcaccctgatcctccttgttattgatggttgaggtcactgtgcgggccgcatttgcgacctcacgattatctgattcaagagccgcagtggatgcaccactcctgctctcgcggacacgctttactatccagcgtattccaaaaaacatggatacggccaccaaagtcagcagccatgacgaaaacagtcccacggcagtaggctgtccaatcttacgggtcgatgaaatcacgtcgacgccgacgtgcgcaagatgttttgagcccaacgctccactggagatggcaaaaagcagactcgaacataccgatacaacggtgcaggaaatgcagaacgctcccgctggataggcaaagccaagcactaccctcttgacatcaatctgctgatcggagttgcctactctgatatgaaagcccttgttgaacagcatgaccaccatgcccgcggcacaagctaaagccaaaggaacgcacatcaacgcgatccgaatccaattcgtttcaatcgcttgaggaagcaaaccgaatatcggcagagacggcaatgccgacccctgaccgctccacatggtgaattccgctagatcgccaatcgaaaaaccggccccgaatacccaggaaatagcccaaatcgcgatatttggaatccaagcgatcatggcgatcgtggtgaggatgcgagaaccgttctgcattcccgatagctcatacaacttcaccatggccgactggttgctgaatgcccagtacaagaccacaatcagtccaatgaccagatagaccgtgatcaacagcacacccaaggcaacaccaatggtgacggttttacggaccggagacgaaacatgctcgctgatccaatccaaatctcgtttggtcagtggtgattcgggaatcgcggcaatggcatagccaagtacaaagacgatcgctgttttcacagcaaccacgcccgtcgtatcaacgagtttgatgtcaaggctattggcgaagaacacattgatcaacacccagcctatggttcctgccacgcatccggacagactcgttccgacgcgtttggcgagcgatgcgataagagcgatcagcaaaaccgtaagcagcaacggcataatcgtcaaagtgatggatccggttttgaaaccgttcccttggctgagaagcacaaccgcctcggtcaaggaaacagagaaggcggagagattgtcgccgccttcttccatggaaataaccagaagcatcagcgcaatgtagcagcctagggcaccggcatagacgaccatggacaatgccgccacggcaagccccttcaaccaatacttcaggttcgccatcatatcgacttggaagcgagcacctcgcgcatgatttcagcggtctgccccggagtgcgtccgacacgaatacccacggcttcgagcgcttccttcttatcttgcgcagttcccttgcctccggaaacgatggcaccagcgtggcccatctgcttgccttccggcgcggtgaagcctgcaatataggcgacaaccggcttggtcatatgctcggatgcccacttggccgcatcctgttcggcactaccgccgatttcaccgatcatcacgacagccttggtggcatcatcgttttcaaacgcctcaagcgcctcctgcaacgtagtgccgacgatagggtctccgccagcacccaaacatgcggtaaaaccaatgtcagacaactctcccatcagttgataggtgagcgtaccggacttagacaccaaacccaaaggtccacgggagacgatgccgtccggaataatgccaagattgcaaccattcacaccttccgtagaaggcagggtaagcagaccagggcagttcggaccgacaatacgcacatccttgcgcaatgcgagttcaacaaagtacgcgctatcggcaacaggaatgccttcggtgatgacaacaatcagcttgatgccggcttcaatggcttcgaccacggcatccttggcgaaacgcggcggcacgaacacgacgctcgcttgggcgccggtgacttccacggcttcggcgcaattgccgaacacacgcaacgtaacatcctcgccgtctttggccgctgggaaattgacttcctggccggccttgcgggcgttgacgccgccgacgatattggtgccggccttcagcatgcgggcggtatgggtcatgccctgatgtccggtcataccctgcacgatgacaggtgcgccatcctcaatgaaaagcgtcatttcagcgaacctccttgccattggccgcaagacgcgcggcctgctgtgcggcttcttccatggtctgtgcaacatgcagattgacacgatcggcctgagccagaatatgtagaccttctgccgccgcgttgccgtcgaaacggactaccagaggcttggaactgccaagcttgtcaagggcttccagaatgcccttggcaacttgctcgcaggatgtgatgccaccgtacacgttgatcaacaccgattcgacttgcgggtcggacagcacgatctccaaactgccgcacatcacttcggcggacgcaccaccaccgatatcaaggaagtttgccggtttgacattggtgccctgatcttctccagctccggaaaccgcgtcaagtgagctcatcaccaaaccagcaccgttgccaatgacaccgacggaaccctgaaggtgcacatagtgcagaccatgctctcgcgccttctgctcaaacggatccacatgcactgggtcagcgaagcgcttccagccatcatgacggaacgcagcattgtcatctaaagaaatcttggcgtccagggcgcacaatgtcttggaagactcgtcatccggatcgccgatcttggcaagcggattgatttccacaagcgtggcgtcgttctctttgaagcactgccacatcttcagcagaatctgtgctgcctggttgacgtcggcatgatagaagccaatgctttccgccatcttggtcgcagcctcgatatcgaaatcctccagagcgtcgatatgcagacgcttcacagattccgggtgttccttggcgatctcctcgacctcggttccaccattcgcagtagcgagcacgtcaaaatcgcgagacgaacgatccacggaaatagagacataatactcgtgaagaatgttctttgcctcggccaccaacacgccgctgaccttgtgcttgtgaatggtcatcggcaggatgtcttcggatgcaagaatggcctcatcacgattcttcgccagcttgacgccaccagcctgaccgcggtggccaatcttcacctgagccttaatcacgttggggtagccaatctgctcggcagcctcagccacttcgtgagagttctgcgcgaacactgccttaggcgttggaataccctgctcttcaagcagttccctagcctggtactcatagagatccatggattcttttcccttgatgctattggttatttacgaagaatgtacttaactcacgcaggcatggtgatcagtgaacttgtcgggcagtctcccagcgatgccatgccaccaatgccgacaagctccatgacgaagctgaaacctgccaccgtgccgccacacttttcgatcaacgaagcagccgcacgcgctgttcctccagtggcaatcagatcatcaacgacaagcacacgagatccctcatgcacgatattcgtctcgatttcgacggtggcctgcccatattcaaggtcatagctttcgctaacggtttccggaggaagcttgccagccttgcgcactgcgatgaagcccttgcccaggcgcgctgccaacgcaggaccaaaaaggaatccgcgggcttccaaacctgcgatgatatcgaattcatcggcagcgaccggcaacgcggcttcgagtgcgtcaagtagcaatccgaaggcacgcgcatctgccagaacaggcatgaaatcacgaaaaagaataccttccttggggaatcccggaatggtgcgaatctttgaaacaaggtactcggcgttttcgtttccaatcttgctaagaccggaaacggtaatatccgacgatgccatgactgtattgtccttcttttgtagtgctacggcactttgcattataggtttccgtcaggaataaaatcggcgaaaacctcaaaaatgagattttcgccgatgccttaatgagcttgtcagctgttcttctgctcggtctcagtctgcgccgcttcgatttcgccttcaatcggctcctgagcagcctgatcttcgtctgtggaatcggtggaaagaggattaccgttttcatcgacctcatcgtcgtgtacgtacgcaggacgcacgtattcgcggctgatggcgttgaaaccgaaacgaatctgagagccttcggaatcgatgacgatctcctcgtattcggtatcgacggaaacaaccttgccgatcacaccaccaatggtgatgacctcagtgcccggctgcaggttggcacggaaatcctgacgctcggcctgctgctgcttagccttcttggactgccagaacatcatgccaaacatgacgacaatgatgacgataagaaacatgtaatccaaagcacaactccttgggatggacgctcgaacaggactctatgtccagaacaccgagtctaagctagcttgctgacatcaacctgagattcgtcagaagtcaagccgagatgatcccatgccttgcgcgtcgccacacgccctttcggggtgcgcgcaaggaatccttctcggaccagatacggctcgcacaccgtttccacggtctccgattcctcaccgaccatggccgacaggttgttcagaccgaccggaccgccgttgaaattggtgacaatggctttcaataccgcaatatccaaacgatccaagccctcggtatcaatctggtacagtgccaacgcctccttgacatcgtccggatgcacagtttctaaatcgtgcacaatggcccaatcccttacgcggcgaagcaatcggttggcgatacgcggcgtgccccttgaacgcatggcaagctgatgggccgctccctcttcgagactgatgcccagcaccgaagaggatcgttcgatgagcttttcaagctcctcatgcggataaaagtcaagatgcgcggtaaaaccaaaacgagccctcaacggtgatggcagcatgccttcgcgagtggtggcgccaatcaccgtgaatctcggcaaagtaaggggaatggaggaagcacccggccctttgcccaccatcacatcaacacggaaatcctccatggcgatatacagcagctcctcggccgctcgtggaaggcggtggatctcgtcgatgaacagcacctcccctgcgtcaagggagcttagaatcgaggccaaatcaccagcatgctggatagcaggtccggaagtgactcgaatcggcactccaagctcgttggctacaatcatggccaacgtggtttttcccaagcccggaggccccgccagcaggatgtggtcagggggaacgtcacgtttacgggcagcatccaaaaacagctgcaattgcgccttgagtcttggctgtccaataaaaccatcgaggacgtgaggacgcagttcctcatcgcttaccggctcgttgccgacaggcgacgcggaaaccatgcgaagcgattcctcattggcaccggtattcgactgttcgaatgcgacgtcgttcgtcatgatgatgcgtttcacctacctcggtcaagagaagccaatgcaagtttgagcacgcggggcacatcatcgtccctcaatggaacattgatatgattgctctcgcagactgtctgcacggcatgcaaggcatcctgctgacgccaccctagtgacatcagaccttccacgacctgttccgaaccggcatcttccgcagaacgaacctctttggaagccccctcgatctgactgagatcgatggaccccttgagttcgagaataatcttctgcgcacccttcttgcctagaccaggcgccttcgccagcgcggtggtatccccgtccgccacagctttcgccaaacgttccggaggcaacgtcgaaagcaaggaaagcgcgactttcggaccaattccgctgaccttctgtaattgcaaaaacatgcgtttcgaagcaagcgaggaaaacccatacaatgtaatcgcatcctgcgaaacattcaatgacgtgtataccttcaccgtctgcccagcgtgcatggacgccaaatccgccgaaggcatacgggtctcatatcccactcccccgacctcaataatcgccgaagcggcgtcaatgaaatcgacctggccatgcaacatgcctatcatgccgtcacctcccgcatacaactgtagaacatctgttcgatagtctacattcccctacggacgccgcgttgtcgcgccgccttctgtgaggccagagcccattgacgctgtgcatcggtcaagtgttgttcacgctctcccccctgtaacgcgcctgcggggcgaagcgcatgacaaatcgctatagccaacgcatcggcggcatcggcgggcttaggcaaggtattgagccccagaatacgggcgaccatgcgttccatctgaatcttttcggccttgccgttgccggtaatcgccatttttgattcagtgggcgtatgcaaggcgacgggaatgcccctctgggccgcagccagcatggccagtccggcggcctgtgcagtccccagtacggtgttgcgattctcctgtgcaaacacacgctcgatggacaccgtatccggtgcgaaccgttcgatcttttccaccaaaccgttatagatggctaacagacgtaagtcctgcgacattttcggatcggaacgtaccacgtccacatgaataaaagaaagccggcggtatgcgccggcttcgatcacgccgaccccgcagcgagtcagcccggggtcgacgccaagaataatcacgcttgattactcctcgtcaagctgagccatgacctcgtcagaggcggtccagttggagtagatgttctgcacgtcgtccagatcatcgaggttgtcgatcagcttggacaccttctgggcatcttcgagagtcaattcgacctcgttcttcggcatcatgaccagatcagcggaatcataatcgaatccagcgtcctgaagggccttacgaacgtcgatcatctcggacggaccggtgacgacagtgaacacgtcgccgtcgtccgtaacatcttcagcgccagcttctgcggccttctcaaacagatcatcaaaatcgacgccctcggccggaacgatgatctggcccttgcgctcgaagttgaagctcacggaaccggaggtagccaaagagccattgcccttggtcagggtggaacgcacttcggcggccgcacggttacggttatcggtaaggcattcaatgatcagaccgacgcctgcgggagcgtaaccctcatagacgatatcttcatagttggcaccgccggcttcttcaccagagccacgcttaactgcgcgcttgatgttatcggcaggcatggaagccttcttggccttgtagatggcgtcgtacagggacgggttgccgtcaggatcgccaccacccatacgtgctgcgatctcgatgttcttgatcagcttggcgaacagcttgccacgctttgcgtcgatggcggccttcttgtgcttggtggtcgcccacttggaatgacctgacataatgctcctaggcaggttgcggatgtttcaaacgaaacgattctaaagcggttctaagacaaagcgcccgacatacgtatgtcaggcgcgtcaacggccgtttcatgcagccggttcacaactgatacgtcttatgaccgacggccatctggcaacgagcctcaagaatgcgttggaatacggtaatgagtcccaaaaccgcaagcaataccatggcgatggccagccataacccttggtgcgtgagcccggtaatcgccatgcccaccagaatgatgaccaatctgtcggcacgcgttgcaatgccgtttttcacttcgaaaccgacggattcggcacgggcgcgcgcatacgacgtcacgaacgacgtcatcatcgacaccatggctgcggcgataccaatccaactaatgcaatccgggcttgaccggttgatgtcataccaccaatcggcatgcaggatgaagaagatgaccactccggcaagcaatgcccaatcagcgatacgatccaatgtggaatccaaaaaagcaccgaattgggtgcctcccgtggtcagtgccgcaattgagccatccagggaatcggcgagcaccagcaacgtcagcaccaccgctccggcgaacaaccatcccgtaatgccagtggcgaaagccaccacaatggttccaatagcgccaataaccgtcaccgcattcgctgtcaggccaagggataccagtgccttggcgaatggctcgataagtcttttgaatggtgcacggagatgttctaacatgcgaattcctgttcttcggaaagcaaaagggcgtgcaagcgtcagtatgtgatgcttgcacgcccccataattcataaccgtatgcgaccgaacgtgaacgaatcagatcagtctgcgatggcggccttgaaatcgtcgacgttgttgacctgaacgcgcttcttcagcacggtcatgatctgcgccttggcctcatcgaccggcacaccgttgagctggctgccgtcacggaagcggaagctcaccgcgttgttgttcatgtcttcctcgccgacgatgaggatgaacggcaccttcgacttggaagcgttacggatcttcttgccgaaacgatcatcggacatgtcgatttcgcaacgaaccgtctcctcttccaagctggcaatgaactgctgcaggtgtggggcgaattcgtcggcaacgggcacgccaagcacctggacaggagcgagccacgccgggaaagcaccggcataatgctccagcaacacggcgaagaaacgctcaatggagccgaacagtgcacggtgaatcatcaccggacgctggtgggtgccatcggcagcgatgtactccaagccgaaacgttccggaaggttgaagtcaagctggatggtggacacctgccacgtacggccgatggcatcgcgagcctgcacggagatcttcggaccatagaaggctgcgccgcatggatcgtcaaccagttcaagtccggattccttggcgacttcagccaacgtattggtggcctcttcccagatttcgtcggagccgacgtacttgtgcggatccttggtggacagctccagatagaagtcgtccaaaccaaagtccttcaacagaccaagcacgaaggtcagcaggttcttcagctcgtccttcatctgctcgcgggtgcagtagatgtgggaatcgtcttgagtcaagccgcgcacacgggtcagaccatgcacttcgccggacttttcgtagcggtacaccgtgccgaattcaaacagacgcaacggcaactcacggtaggaacgctgacgggatttgaagatcagattgtgcatggggcagttcatcggcttcaggtagtagtcgaagccctgcttgacgacgttgccgttctcatccttttcctcgtccaaacgcattgccggatacatgccatccttgtaccaatgcaggtggccggaagtctcatacagaccgcccttggtgatgtgcggagtctgcacgaagctgtagtggtgcttgcgatgcatttcgcgggagtaatcctccatcgcgttgatcacagcggcgcccttcggatggaacacagccaagcccggaccgatctcgtccgggaaggagaacagatccatttccgcgccgagcttgcggtggtcacgcttggcggcctcctcaaggcgggtttgatatgccttgaggtcctccttagtggcgaaagccgcgccatagatgcgctgcagcatcggattggcttcgcttccgcgccagtatgcggctgcagaacgctcgatcttgaacgccttgatatagcgagtgttcggcaggtgcggtccgcggcacagatccttccacaccacattgccgtcacggtcgacgttgtcgtagaagctcagttccttgccgctgatttcggtggcggcttctggatcgaggtgggcttccttgtctttgatgagttcaatcttgtacggctgatcggactcttctgccagagcctcctcttcggtcaccacgcggcggcggaaggactgggaggacttgataatgcgctgcatgcgcttttcgatctctttaagatcgtcaggagtgaacggagtctcgacatcgaaatcgtaatagaaaccgtctttgatgaccgggccgacgccgagcttggcatcaggacggatctcctgcacggcctgtgccataacgtgggttgcggagtgacgcatgatggccaggccatcttcgctgtccaatgcaatcggttccacgacgtcgccgtcgtgcagtccggtatacaggtcgcggggttcgccgttaagacgcactgcgatgatattcttgtcttccgcgaagagctggacgccagtctgatctgctgccacctccttcgcttcgccgttgagtgtaatggagatggtctgttcagccatgagttgtcctttgctatcggggtccgcggtactaatgtgcaggcctggactgtatgtcaacgatgaacaagatagggttgagtgcagacatcggcacgctgaaagagtgaacagcatgctacagcgcgattatattttaacggatcgtatttgatgctattcgacgacatgcgcgtacgtgtattgtggcgcgcttcgtgtcgacgtgatctccaccttatcggatggcacgatcgacacggtggctccgtatttcactttcaaacgtgaaccgacgcctccagcgagattgaccgcgttctgcagattgtcgctgtctccaatcgccctgatgatgaacggcgccttgatattcgtaccgtcgcaatcgagaccgtccgccgtatcgctgatgtatgtactggtaatcacgcgaatatcgttgatttcaatgacttccgcgccgctattgcgtagttcctcaagtagggtgaataaaatcgacgcgtcaatatctcgctttgatcctttagaaatacggatgaccacgccttcgccggatactggtaaacgcccggaaagaatgccattcgattcagcgttctgcctggcgatttccgctgccttctcgttcttgtcggcggtatccttcagagagtcaagctgattggatagttcgcttttacgctgttcgagcttttgcacctgcgtactcgtttcgctaataagcttggtcagctcgtcctcgctcatcgtctcatatgtggaggtcgtgttgttcagctggatagcgtagctgaagcccagcaacgcgcaaagcacggttacgagcacgcttgaatacaggcgcgcgcgagtggccttcgcattcagcgaaaccctcttcggtttgcgcctgaccacaggaaacgatccggtttgggtgctgtcgttgttttggtctttgacgatctgctcgtggatcttggagagtacatccttgttggcatcgttgcgtctgctcatacgccgtcatcccttgaagatgaaacgtcggatggatgacacattggtgaagattcgaatgccgagcacgacgatgaccgcagtctgcagctgggaaccgacgccaagctggttgcctaggaaaaccaacaatgttgccgtaataacattcgagaagaaggaaatcacgaagaccttatcggaaaagctacgctgaaaataggctcgggcggcaccgagcagcgcatcgagcgccgccagcaccataatcggcagatacggctgaagcgcaatgggaatgtccggccggacgaacacgccaatgaccacgcctatgataagtcccaagaccgctgccattacttgaccttccttgcatatgtcacttcgccggtcaccgccgcttccagcgtaatcgatttgcttctgctcacctgcggatagataccggcttctttgaaatcatcgtacaaacgtttttgcgttttcttgctcaccgcattggcaagcgcactggaattgccgatcgcctcgatgcgataggggctttgcacggaattgacgccgataaggatcgtcgtccctgccgttcgtatggaagtctgcacaccgagacgatacccgttaatggcgatcgcctccgcaccggactgccaaagcagcgagacaagcacctgcagatcggaatccgtgaccacacggacttggctgccgttttcccttggcagtgacgaatccgcgttgtctccgctcaccgatattggattggcgatggtgagcgtgatgccttcgccttgcacaggaagtacgccattgaccatttcgtcatcctgtatggtctggttcagagaccagttcgacacggatttcgattcctcctcaacccgggctcgcagcgcgttcacgtctttggtgagggtttcgacgtttttcgtttgatcagataactgacttgacagttgcttgcgtacttccttacgtggatcggtactcagctgtcggacgaacacgcttcccgccgtgcctacggcaatgcagataaggaataccaaaacccgggtgaaccagaccgaaaacaatgacggagttttggtggccaacctcgagtccgtgtacatcacgtccatcggacgattggtcaaatcgtcaataagccgcaatgagtcatcatccagattccgccttctgcgcgaagtggatgtcacgatatcaggctgcacatgatgcgaagtcagcccggcgaaggacgccgagaaaacggcgcgccgcttcgtaggcgtattctccggagacaccgggaacgacgcacgttccggagcatcatgcatcatgtgagtcaatccttatcgttcttcagaagctggattccctgacgtatgtaaatatagccggcaagccagtacaatcccacaccccatatgccggtggcgagaccacacaaatgcaaagtatccgtagccgaattagaccagatatctgcgaaaatcaaggcgacaatggcaatcatcagcatggcggtgcctgcttttccaacgaaatgcaccggcagcggaccgtaatcacactgcgccaaaaccagtacaagaatcgccatgatcaaatctcgcaatccgacgacgatcagcatccaccatggaatgatgtcagcgactccaagcgcgagaatactgcagaaaatcaataatctgtctgcaataggatcgaggatctgcccgattttgctcacctgattgaacgagcgtgcaatcagaccatccaagccatcggacaccgccgacagcgcaagcacaatcaatgcaagcaccatctcatggcgagagaccaataccgagatgaagggaatcgaaatgattcgcaacaggctgataaggttcggaaccgtgaaatagatatcccgcggttccggactgtactgttttttgataatcagtttgctcatacttcgatcaacgttacattctcgaggcctgcaaagcggtgacgattatgccacgagcaccaacttcatacaactggtccatgagttggttgaccttggccttcggcacaacgacacgcacggccgcccactgcttgtcatgaagcggggaaaccgtcgggctttcgaatccaggcgtgatgtccacagccgcggaaaccttctcgactggaatatcgtaatccatgagcacgtaacgctgagcagtgagcacgccctgcagacgacggctaagaatcgtcaaacgatcatcatcttcagcaagacgaggggaacgaatgagcacagcttcagaatgcaacagcggttccgcgaaaatacgcaggccggcgttacggagcgtggtgcccgtggacaccacgtcggcgatcaaatcagccacaccgagttgcactgacgattcgacggcaccatcaaggtgtacggtttcagcgttgatgccatgctcagccagataatcatgcacaagcttgtcgaaactggtggcgacgcgcttgccttcgatatcttcgagcttgctaatcggagaatcattgggggctgcaaaacggaacgttgaagcgccaaagccaagctccatatgctccttggcatccgtaccggagttgagcagcagatcatgaccagtaatgccgacgtcgatggtgcctcggccaacgtagacagcgatatcgagcggacgcaggtagaacagctccacgtcattgtcgggatcctccacaaccagctgacgcggattgctcctcaggcgataaccggcctcggccagcatgttccatgcaggttcggacagcatgcccttgttgggcacggcgattctcagcattttccctcccaaaaaggccacgcctcctatggcacggccaaaaactcacagattcttgtagatgtcttcgagtgtgatgcctcggtcgatcatcatgacctgcagatggtagatgagctggctcatctcttccgcagtacgatcggcgccttcgtactcagctgcgatccaggtttcgcccgcctcttcgacaatcttcttgccgatgaaatgcgtgcccttgcccagttcgtcaacagtcagcgagccagcctgcttggctgcggccttctcgctcaattcagcaaagagggattcaaaagtcttcattattcgtatctatcctcgaaatattggtaggttcaggccttgaatgcggcttcagccttctcacggatggaatcaatggcttccgcaggatcctcggcaccatacacggcggaacctgcgaccagtacgtcggcaccggcctcggctacaatgtgcgcggtcttcgggctgacaccgccatcgacctgaatcttggtggcgaggccgcgacgggtaatctcgtcacgcagacgacgtaccttggccatctggttgtcaaggaacttctggccaccgaagccgggctcgacggtcatgataagaatcatgtcgaattcgtcgagaatatcgaaaatcggctcgacaggttcggccggacgcaccgcgaagcaagccttgcaacccatctcgcgcagctggcgcgccagacgcaccggagcgtgggttgcccccatgtggaagcttacggatgcagcgcccaacttggcatattcgggtgcccaacgatccgggtcctcgatcatcagatgcacgtcgaccggaagatcggtgacttcgcagatacgagccacaatcggctcgcccaaggtcagattcggaacgaaatgatgatccatcacgtcgacgtgaacgagatctgcattggagatggccttgaggtcgcgctcaaggttgcagaaatcagcggacaggatgcttggtgcgatttgaatagtcatggctcttattctatgaaaggtaatcgacttgctgttatttgatgccgggctgcttgtcggtattcgagacagtttcggcatcgttggttttgatttcatcaaccgtttgctcggggaaagacaccacggaatccgaagaatcctccgattcaccgttttcaagacgctgctcgatttcggtgacggtacgaagcttctccgccaacaggtcagtgtctttgcccatttgctgcacgacgatgaatgacaccgcgccgagcacgaacaccgccatggagacccacacattgatgcgcacgcccaagaattcgtgcgcataatcgatacgcagggattcaatccaagtgcgtcccagggtgtaccacatgatgtacacggcaaacagggaacctgccttgagtttcttcatggctttggaaccgatgtatacgataatcgcggcgccgatgaggttccagatcatctcgtacaagaacgtcggatggaacagcgtgccactcgggcatgtggctccgtcatagcactgttcgctatgcccgatggcagtgccttccatgttgagtttcaaaccccatggaagcgttgtcggagcgccatacagttcctggttgaaccagttgcccaaacgcccaacagcctgcgctaccaacaggcccggagcgatggcgtcagccagcaaggccattggatagtgcttatgacggcaccatgcccatgcggccagcgctccgaacagcacgccgccccagatgccaagtccgccattccaaatgcggaacatttccgcccagtcgccatccggtccgaagaaacgttcaggcgtggtgatgatgtgataaagtcgtgcgccaataatgcccgcaggcacgctgaccagagtgatatcaagcacttggtcgaaattgccacccaactttttccaacgtgtggtggttatccatactgcaaggacgattcccatcaaaatgcacaacgcatagatatgaatcgttactggaccgatggaaaactgcgaaatcgttggcgatggaatgtatgcaagtgtcatggtttcctgatggtagtccacgcatccgatatggtgcgtggaccactgaaatcgtcagaatggtttactttgcgacacgcgcgttatggacgccgtccgcaagctcttcggctttggcggccaacgccttgagacccgtggcctcatcgactgcgtttttcccggattcgtcaagcatggtgtgcaccaatgcggatccgacgatgacgccatcagcgtatgagccgactcgcgcgccttgttcggcggtggaaacgccgatgccaacgcagacgttcttcgcgccggcattgcgcgtgcgtgccaccaactcttccggagaagcatcgatggtggaacgttcgccagtgacgcccatacgggctgccgcatagacgaagccgcgagcgttgcctgccacgaccttcaaacggctgtcggtggagtccggggacacgaggaagattcggtcaagtccatgacggtccgaagcttcgatccattcacctgcctcgtctggaatgagatccggagtaatcaggccggcgccaccggcattttcaaaattgcgtgcgaaacgttccacgccgtaatggtagatgaggttccaatagctcatcaccagagggactcccccggcgttggccacggtttcgacggctttgaacacgttcgcgattttctcgccgttgtcaatggcgatctgcgaagccgcttggatgacgggaccatccataaccggatcggaatacggcagaccaatctcgacggcatcgacgccatgctcaaccatggtgcggaatgctttcaacgaatagtcagaatcagggaatccatatggaagataaccgatgaatgcaggcttgttcgccgctttgaattcatcgaacatggcttccgtcggactcggcttatggctgatgccgagaggctgcccggacggcgtggttactgttgcgttcgtcataatggatactccttctttcactcgccgtccgcgttattgccctgggctccattggcttcgagcgctttggcttgctcgtcggtcagataaccgaaccatttgccggcagtgttcatatccttgtccccacgaccggaaatgttgatgatcatgaccggatgctcatatcccttggccttgagatcctcagccgccttgtatgcgcctgcaacggcatgggaactttcgatcgccggaataatgccttcggtctcgcagagatccttgaaagcgctcatggcttcctcatcggtcgcccaagaataattgacacgtccgatttccttgagccatgcgtgctccgggcccacagaggcgtagtccaaaccagcggagatggaatacgtatcgagggtctggccttcggaattctcaagaagatagctcttggcaccttggaacatacccagttcaccggttcccggtgcgaagcgaatggcatggcgtccggattccggaccattgccgcctgcctcatagccgtacaggttcacgcgttcgtcatcaaggaatgcattcatgatgccgatggcattggaaccgccaccgacgcatgcacaaaccgcatccgggtgatcgataccataccaatcctgaagctgctgcttagcttcctcgccgatgatcttctggaaatcgcgcaccatagccgggaatggatgcggaccggcaacagtgcccagcaggtagtgagtgtcttttacattggtaacccagtcacgaagggcctcgttgatggcgtccttaaggatgtgatcgcccaaggtgacttccacgacttccgcaccaagcatgcgcatacgtgcaacgttcagggcctgacgacgcgcatcgatttggcccatgtagatacggcacttcagtccaagcatggcgcacaccgtagcggtggcgacaccgtgctgacctgcaccggtttcagcaatgacccgagtcttgcccatgcgcttgaccagcagggcctgaccgagtgcattgttgatcttgtgcgcgccagtgtggttcaaatcctcacgcttgaggaacacgcgggcgtcaagaccagtcttttccctcagacgctcggcaaagcgcggcgcatcggtcaacggtgacggacgaccgacatactgctggttcaatcgagccagttccttatgaaattccggatcagccttggcttcctcgtagacacgttcaagctcgtcaagcgctgtaatcagcgcttccggcacatagcgtccaccgaactgaccgaaatacggtccttcatgacttgccaacggggtttgttcggatgctttcactcttgctcctgcctttactagtcgctccacagcctgttcatggttggatgcggttgcgacaccttcgccaaccagcaccgcgtcggctccggcgcgggcataatcctcaagttccaccgatccgaacactccagattccgctacgcggatcacatcgtccggcaaatcggcggcaagctcgttgtatttgttcacatcgaccttgagatccttgagatttcgtgcattgatgccgatgactcgcgctccggcattgatcgcgcgctgaatctcctcgcgagtgtgcgtttcgaccagcaccgtcatattgaggctatgcgccagttcaagcaaagacttgagcttgtcgtcatccaacgcggcaacaatcagcagcaccaaatcggcaccatgcgcccgtgcctcccaaatctggtattccgtgacaatgaaatccttgcgcaacactggaattttcacggctgcacggaccttatcgaaatcgtcaagcgatccaaggaatcgacgaccttcggtcagcacggaaatcgcgctggcacctcctttttcgtattccctggccaatgcggcaggatcaggaatgtcgctaaggtgccctttcgatggcgaagcccttttaatctccgcgatcacaggaataccatccgcttttttcagccactgtcgcgcatcaataggaaccggcgcttcgaatgtctgacgcttcacctcatcaagggaaatgttctgttcacgtgctcgttggtcttcgacagctcccgccaccagttcatcgagtacagacatggtgttcctttcagcattttactcgattggttagcttgatttgactcacaactggcgaagctgcgaggcgatctgcaccgcttcgacgctggcctcggccttgttgcgagtctcctgccactcactggccggcacggaatcaagtacgattccggctccggcctgcacgctcgcttcatggtcgcggatgaatgccgttcgaatggcgattgccatatcgaggttgcctgaaaaatcgaaatagccgacagtgccgccataaatgccacgatctgcgggctcaagctcgtcgatgatttcaatggcacgtggttttggcgcaccggaaagcgttccggctgggaatgccgacgtgaacacatcgaacgacgtcatgtcggggttaactcgcccggtaacggtcgaacagatgtgcataatgtggctgaatcgtttgatatccatcaaggatacgacttccacgctttccggaagacatacacggctcagatcattacgggaaagatcaacgagcatgatgtgttcgctacgttcttttggatcggcaagcagatccttggcaagttgctcgtcttcctcaatagtggtgccacgaggcctcgaaccggcaatcgggaaggtcatggcatggccattgtccactttgatcagcgtttccgggctggatccaataacgttgaagtcacgcccctgcgcatcggtcaacgacatgaaatacatgtatgggctggggttgagcgtacgaagcacgcggtacacgtcgaatggatcggctggcgaatcaatgtcaagacgctgggaaatgactacctggaacacgtcaccatcgatgatgtgctgcttggcgatttcaacggaacgctcataatcgctcttctccgtacggaaacgaagctcgggctggctaatggtctcatccaacacattgacgcgagcttcaccttcgacaggcgtggcggccttacgctgcatatcatccaatcgcgccaccgcctcgtcgtatgccgcatcggcacgggtggatcgatcgtctacattcaccgcattggcgatcatccataccgatccggacacatggtcgaccacagcaatatccgtggccaatgccagaactgtttccggctgcccggtctcgttcggcgcctcggcacgcaaggtcggttcccaatggcgaatcgcatcccaaccgacggtaccgaccagaccactggtcaggttcggcagtccttcgacatgcggcgctttcagtgttttcagcgcagcatgcgcgacttccatcacatcgccttcggtaggcgcgcctgcgggaacctgacccaaccaatcggccttgccgttgttggaacgcaactgagccatggaattcacaccgatgaagctgtatctgttccacgtgccgccaaattccgcggattcaagaatgaatgtgccggaacgtcctgcagcaaggcgttcatagaatccgacaggagtcaacgaatcagccagaagtcggcgcacaatcggaatcacacgatatccctgatcagccaattcgtggaattgttcgcgactcggccaggtggcgccccacttgagtgcttgtacgctgcattcactcatcgctggccctcctgttccttggtacggtatcctacgaccacgggcagttgcccgccttcttcgaagcaggatcgtttgccggtatggcaggccgctcccacttgatcgacttcaaccagaatggcatccccatcgcaatccagtgcgaaggacttcacatactgggcatgtccggaagtgtctcccttgcgccagtactcctgcctggacctcgaccagaacgtgacgcgaccagtcatcagggtgcgtcgtatggcttcgtcgttcatgtagccgaccatcagcacttctttggtgtcgaattgctggatgacggctgccaccagtcctttatcgtccctcttgagacgttctgcgattcgtgggtcaagaatagtgctgttgtcgtatgcttcgttggtcatgatggtgttattgatttgtttcttcgattattgattacgttattcgcctgttttgcggttttcggctttcatcgcacggtatagccggcggccttgatggcatccttgacttcgccgatggtgactttgccgtaatggaagatcgacgcggccaacacggcatccgctccggcttcgatcgccggggggaaatcggcagccttgcccgcacctccggaagcgatgatcggaatcttcacttccttacgcacggctttaatcatttccaagtcaaaaccctgttgggtaccatccgcgtccatggaattcagcaggatctcccccgcgcccaactcctgagcacgcttgacccaccagatagcgtcaatgccggtggatttgcggcctcccatggtggttacttcaaagcccgactgagtgtgtcgctcgccctgctcacggcgtgcatcgacggataatacgagcacttggttgccgaatcgttctgcgacacggccaatcagcgtcggatcattgatggccgcagtgttgactcctaccttgtcagctccgcaacgcagcagagaatccacatcttcaggggcacgtacgcctccacccacggtcaatgggatgaaaatctgttcggcagttcgactcaccacatcgaccatggtctgccgatgcgagctcgaagcggtcacatcgaggaaagtcagttcgtcggcaccctgacggtagtattccgcggcaagttcaaccggatcgccggcatcgcgaagattctcgaaatgcacgcccttgactactcgtcccgcatcaacatcaagacatggaatgactcggactgccagtgacatgctgttttactccttcgcgcataatcatgtgtgcaacgaatgcaagagtaaccgttttacgttacgcatgttcgtcggaagtccgagtagcggacagaacaagcatctttccttgaaatctaatcttgttccttagctgcgagctgcccgcatgcaccatcgatatcctgcccgcgtgtgtctcgcaacgtcgcagtaatgcctgctttatgaaggatatcaaggaactgctgttcatcctcaggcttcgaagcggtccatttcgatccttcgatgggattgagcggaatcggattgacatgagcccaattgtcaccgtaatggttcaatcgcttagcaagtaatttggcatgctcggcttgatcattgataccgcgcatcagagcatattcgatgcttacgcgacgtttcgaagccaagtaatagtcatgtgccgcatcaagcacctgcgtagtattgaaacgcttgttcattggaacgagctcgtctcgcaactcatcgctcggagcgtgcaaggacacggccaaacgcaccggaatgccttctgccgtgagtttcttgatacctggtaccacaccgaccgtggagacggtgatgttgcgtgccgaaatgccgaaaccttcaggtggcatggcgctgatttggcgtacagcgctcaatacggacttgtaattgcccataggttcgcccatgcccatgaacacgatgttgctcaggcgcccgagaccaccagcgacttcgccgtcgtgcatggctttcgcggccacacgaacctgttccagaatctcgcctgccgacatgtttctcgtcagacccaattgacctgtggcacagaacgggcagcccattccacagcctacctggctggaaatgcataaggtggtgcgggtgggataccgcatgagcacggactcaataagagaaccgtcgaacagacgccatagcgttttgatagtagtgccctcatcggccacttgacgggtcacttcggtaatgagcgttgggaaaaacgcctctgcggcttcggctcgtttcgctgcaggaaagtcagagaactcttcggcagcgacgtcgaaatgcccatagtaatgcttggcaagctgcttgactctgaatttcggaagtccaagatccttggctttcgcgatacgttcgtcttcagtcatatcagcaaaatgcagcggcggcttgcctcgacgcgcatgatctttggaaagcacgtcgcggaaggcaccggtagtgcctcctggagtaataccggtttccggcaaatccttcgtggaattcacggagtcgctcatgcttgtgtttgcctttctcacattccagttgcccacagcagcacgcacacgaacggcgcgcacagcagaatggaatccacacgatccatcacgccaccgtgtcccttaagcaggtgtcccatgtccttgatgccgatatctcgcttcaacatggatgcgcacaaatcgccaaacgttccggcgatgccgatcatgaaaccggccacgacagggacccaccagcgggaaatccacacatccgacccgtacgtgcagaacatcacggcaaaagatccgatcatggagaacagaatggaacctgcaagaccctcccacgatttcttcggcgaaatgcgggggcttagcttgtgcttgcccagccatgccccggcgaacaaaccaccggtatcgctcaacgcgggcatgaataccatcataatagcatgcgcgacgggatgatcattgaatgtcaacggcatgatgaggcaggaagccagaagcggaatgtacagcacggtgaacatggagaccgcgacatggctcagcctgctatggcttacctctccctgctcatggttgaaggaggattcaagtcttgcgcctgcatcggtgtgggaaagcttatccgccacggccagagagatgcggctgccgaacgtcactttagcgctggcggcgatcgctacgaccaccaaagacaccagcacgcataccgtcatggcgacgatatgacgttcgctgtaataggtggacagcaacgtcaccgccgaacatacccacaacaccgccacgggaatatgaagtcccgcagtggcgaaatcgacgcgcagctcccaaagggcaagcaccatgaacagcacaaccagatagacgaacaagtcaatgctgatcagcagacacgccaagatgaggatgacgagcaccgcccctgtggcgatggcctgcggcatattacgccccgtcttcttgttgatggcgttgatggcctcttcggtttctttttcgagctgttcctgatgttccatcatgttccctgtctggctgtgcgtcgattcttttcaggagatgaaggtctctcagacctccatgatctccttctgcttggcttcgagcagggtatcaagttcatcagtggtctgcttggtgatcttgtcgagctccttgagcagacgatcgccctcgtcctcacccatctcgccgtccttgatggccttgtcaagggattccttggccttgcgtcggatgttgcgcactgcgaccttgccatcttccgccttgcccttggcgagtttgacatattccttgcgacgttcctcggtcagctccggcatggtcaggcgaatgacgttgccgtcgcgacgcgggctggcgcccagatcggaatcacgcaacgccttctcgacggcattggcctgggacgcgtcaaacggagtgacggacagggtacgcggttccggcacgccgatggtggcgatggccttcagcggggtcggagctccataataatcaacggtgataccgttgagcagcgccggattcgcgcggccggtacgaatgccggagaagttctccttggtggattccacggacttggccatctgtgccttggcctgttcgacaatagttgccatttgtactccttgttgttggttgtttgatcgatattcgacgttgaatgtcgttattcagcgagtgtggactccgcggtggaaaccatagttccgatttcctcaccgagaagggcgcgggtcacattgccattgccttcgagcccgaaaacacggatgcgctgcttgttgtcgcgggccatggaaagcgcggatgcatccataacggcgagattgtcgacgagggcacgattatagctcaatgtggcgaaacgcttggcgttctcgtccttacgaggatcggcggtataaacgccgtccacgccgttcttgcccatcagcacctcatcgcaatggatttccaaagaacgctgaatggacacagtgtcagtggagaaatacggcataccggcaccagcgccgaaaatcacgacacggcccttctccagatgacgaatggccttgagcggaatgtacggctcggcgacctgacccatggtgatggcggtctgcacgcgcgtggcctgtccctcctgctccaagaagtcctgcagagcgaggcaattcatcaccgtgcccagcatgcccatataatcgccgcgggagcggtcgattccagcctgttgaagttccgcgccgcggaagaagttgccgcctccgacgacgatggcgacctgaacgccctgctgcaccgcgggaacgatttcctcagcgatacggcggatgacggacgtgtcaatgccgactttgccgccgccaaacgcctctccggatagtttgagcagcactctgcgtggattatcaccagtgttttcgccagtcatgaaaagcctttcttgcccgagaactcacgaaatttaccgctctcaagagtatcggcaaacacagacaccacaccgcaacgacacagcgtcgagaagaaaacaaagttggccatcatcctgtggatgatggccaacctcatggaatctctagcgtctaacgcacggattcaccattgaagccgaattcactcagcctcgcccttgccgacctcgacacgagcgaaagccacggctgcgccgccgacttccttgaacaggtcgccaacggtcttggacggatccttgacataggactgctcgagcaggacgttctccttgtagaaggcattgagacggccttccacgatcttcggaacgatcttctccggcttgccttcggccaaggacttctcggtggccacgcggcgctcggactcgaccacatcggccggaacgtcctcgcgggtcagccactgggcacccattgcggaaatctgcagagcggcttcgtgagccacagcagcgccggcctcatcggtggcgatcatggccacgatgctcggcggcatctcagcggacttcttgtgggcgtagatctcaacgtgtggcccctcgaccttggcgaactggccgaccttgacgtgctcaccgaacagagcggccgcctcttcgacggcttccttcacggtggcttcgccggaagcggctgccagcacttcgtccacagaagcggcctcggctttgacggcgtcttcgagcacgctgtcagcgaactccacgaacttcggagtcttggccacgaagtcggtctcggaattcagttcgacggcgtaaccggtctggccattggcggattccacgacctgggaggcgatggtgccttcctgagccttgcgaccttcgcgcttgccagcggcctggatgcccttggcgcggatgatttccttggcgcgagccacgtcaccctcagcctcggtcagagccttcttaacgtccatcatgccggcgccagtttcctcgcgcacctgcttgatcagagctgcagtgattgctgccattgatttgtctcctctgaaaaatagtgatgccccatatgatgggaggcacaacacctcccatcatagtggatattttcactcagccttggcttcgccttcagcttcggcttcggcttcagccggtgcatcggcggccggagcgccctcagtgaggagctccttctcccaagcggccatcggctgctcggtctcgccctcagccttagcggccttgccggaacgctccagcaggccttcggccactgcgtcagccatgaggctggtcagcagttcgatgccgcggatggcgtcatcgttggctgcgatcgggtactcgacggactccggatcagcgttggtgtcgacgatggcaacgaccggaatgcccagcttgtgagcttcctcaacggccaaagcttccttgttaacgtcaaccacgaacatggcggacggagtacggttcatgttgcggataccgcccagctgcttagccagcttgtccttctcgcgctcgagaagcagcagttccttcttggtcagaccggaaccacgcacgtcggtgaagtccatctcttcgagttccttgagacgggagacgcgcttggacacggtctggaagttagtcagcataccgccgagccaacgctcggaaacgtacggcatgttcacgcggacagcctgattggaaacggcttcctgagcctgcttcttggtgccgacgaacagcacggtgccgttgtgagcgacggtagccttgatgaagtcgtaggccttgtcgatcatgtcgagcgacttgaacaggttgatgatgtggatgccgttgcgctgggtgaggatgaactgcttcatcttcggattccaacgacgggtctggtggccgaagtgcaggcctgccttcagcatgtcgctcatattgatctgagccatggtattactacctctttctgtcggttcttgcctggtcatgcgttcctgcgtgcagccaaagccttgcggcgtcggccgaccgacacaggtcgtcgcgaacatgacgcgaattggttgtatgccggttgacaatattgggtggctcaggactttcacgacaaagcccttcgccggatggcacacaaggcataaaataccatggggtcacgtcttttcgcaaagacgtgaccccaagtcgtcatatcggtgagatgcgaacaatcacttgtggtgattgcgcatgtagcgcatcgcctctcggcgttcctctttctccaaacgatcaagatagacatgaccgttcaagtgatcggtttcatgctgcaacatgcggcccataatgccacgaccttccagcacgaccgtcttgccttccaaatcgatgccacgcacacgagcgtaatcggcgcgacgggtcttgtaccacaatcccggcacagacaggcatccctcatctccgtattgttcaccgctggtctcttcgaggacagggttgagcacatacccgatcttgccgttgatgttataggaaaatgccctcagattcacgccaatctgattagctgacaagccagcccttcctggatcgtcaacggtatcaagcagatcctgtaccagatgacgcacggccggcgtaatttccttgataggatcacagggggtacgtagcaccggatcaggtacgactcgaatctcacgaattgccaagattatcgctcctcgttcatggttgtttcctcagtttccgatgagtcttccggcgtttggaactcgccggcgtcttcggtctgcttcttaattttctcctgcatggtatcaaatgcctgccgaaccttcggacttacggattcggaagcctgacgcatggattcggaagcctgcttgaccgtttcggtggttcggtcaagaatctgcaccgtctttggcagcggtttgttggatggcttcggcgcatacagcacattgtcgatgacattttcgtaccgcttaagcaccttcggcctgacaactttcaggctcgccgtcagagtgcccttctcctggctgaactcctcgtcgaggatttcgaacttgcgaacggattcagcacgagagacattcgcattcgccttttcgacatactgctgaatgaatgcgcgcacggcatcgttcttcgcgatctgctccatgggcatgttgctatcaagtccctgccgtgcaagccaggaacgaaccatctcctgatcaagctcaatcaaagctccgatgaacggcttgccatcaccgaccaccacaccatgcgacacgatcgggcaagtgttgatgacatcttccataggtgccggactgacgttcttaccgccggccgtaatgatgatatccttcttgcgacccgtaatgtacacgaatccgtcgtcgtcgatggttcccaaatcgccggtcttcagccagccatcagccatcttgacatcggctgtcagctccggcttcttgtagtagccaaggaacacgttggggcccatcacctgcagttcgccgtcgtcatcggtgcgcacgcccatgcccggcccgggcttgcctacggaaccgacgcggttggcgtcctgccagttgacaatcatgggcgcggcggtttccgtcatgccatagccctgaatgaaggtaatgccatccataccgttgaagaaatgggcgagatcgacgttcaaaggagcgccgccacaagccagatatctcatgttcggacccaaagcagaacgaatggatttgcctacgacagacataaagaacgaatgttcggcacgagccacaatggaatggcgtccggtttcctgctcgtccttcgaccattgcacaaaatgatcgaaagccttggcgaacactcttccacgaatacccgctccggccttttgcgaagccgcgttatacactttctcgaacacacggggaactcccagcagataggtcggcttgaagctacgcagatcggcaagcagatgcttggctccgggcagatagccgaccaccccctgcccgccaatcgcaacatactgaatatagcgagcgaagcagtgcgccaacggcaggaacaacatcagacgattcggctgatatagcatttcatcgagaatgatgtagccgttcagcacgatatgcgtgaaatttcggtgagacagcatcgctcccttgggcttgccagtggaaccagacgtgtacacaatggtgagcatgtcatcggccttgaccctggaaatcacctgatcgagcgtgtcctcgccgacaccttctccaaaatcagcaacggcatcaagaccatccgccttgaagttgaagacgtagcgcaggctgctgtgctcatcgcgaatctgttcaagcgtttgtgtatgcgcgaaatcaccggcaaaggcgatgatcggatccacctcttcgatgatggacgcggcctgcctggcggaatcggtttcatacacgggcacgcttaccgcgccgattgcggcgcaggcaaaatcgatgactccccattcgtagcaggtaggcgaatagatgactaccatgcttccggccttgacccctaggccaagaagacctttcgcaaccgcgcgcacacgctcaagcatctcccccgccgtaacgtcatgccatcgacgagtcccgtcgtcctgccattgggcgatgagatcatcaggatcacgtttagcgcgtctggagagcagtgcgaaaacggtatcctcatccgtagtgctatacgcaggttccggtacaaattctctcaacatgagtccctatagtagttgcagtatgctcaaggcacgctgaaaacccttgaaaacggctgaattcagccaattccaagggttttgaatggttacttgttatacgtcacacgccgaaatcagcgacttcgcacttccaagcagatcccttgaggacgcacttcaaattgctgcacagccttcgtcctccaatgcccatcagcacggtgctttcgaagcatgtcggagagaccaaccagctgtcaacgtaatatacggtgatcggaagcagacccaactgcgcgtatatcctcacatccttcttcatctgtgctgcgatctgagcggaggcatttctcagctttctcatgcaggcctcgctcaataccctttccacgcgtgcttctttctgcctgccacggaagatatcgacaacattgcagatcaactgcgccgcgaacatgttcatggagtaggcaaattcagcatcgcacggcccaggcattatctggatgtaatggaatggtattttcctgccgaaaagatctgaattaagaaacccatcatacgagggaagcgttttatcgtaatcgaaaaccggctttctgccaagctcaagagatatcctttcccactctgtcaggttttctccctcgcgtttcttcccacttttatcagcgcgcttcgcattggccgctgatccctggtcagaaggtggaacctccgagaagggctcgttagcctccggcggcggaacatcattttcacatgaatcatccatgatgaatccctttcttattcgcccgactcatcgttgagagggggtgtaagaaccattaaggcacaaaagccatcccccgtcaagttgacatttgattcttgtggataagtggataacttcagatgtttcaaacactttagaacaccctaaagataaattttatacccctaaaacattacaaaaaaggtggcatatcgttgaaaaagcaaagagaatccttctttggcgaaaaaccctaagttcgtctcaaaaacgcttagtaaaaatgaacggcattagccttcactgaaagataatgatcatgtttgttcgtatatgctcacataaagttatgttaccgggcatacactcctctaagtgcgctcaagaaaaataaaaaaattggctctgcggcgttcgccgcagagccgtctgagaatgggctcccccacctggactcgaaccaagacaaagggttccaaagacccgtgtgctgccattacaccatgggggaatggcggaaaaccttgcggttaccgccaagtgtctattatgccacatgtcgccaacaccgcgtgtctcgacgtgtcgcactagtaaaaaacgttgtttaaggtgcacaaaaagtgttatgcgcaccttaaacaacggtactcgcttcactgatatgggagttaccccacaaacatgcggaacgtacgctaagcatgcccgcgcaacgcgtcatcaggcgaacaagaagccctgtccgtgatgctccggatatgtgtcgaacaactcagccacagagccgtcttcgaacacagcacggatggcgctggccagcagcggcgcgatcgacagcacggtcaaaccgtcccaacgcttctcttcaggaatcggcacggtgtcggtaagcacgacttcgcgggctccgctgttcttcaaacgttcgacggcgggaccagacagcacgccatgtgtggcgacgacagtcaccgacttggcaccggcatccttaagcacgctgcatgcaccggcaatggttccggcggtatcgatgagatcgtcgacgagcacgcagtccttaccttcgacatcgcccacgactcggttggcgaccgcttggttcggacgggtgatgtcacgcgtcttgtggacgaatgcgagcggaccaccgccaagacgctgcgcccactgctccgcaacacgaatgcggcccgcgtccggagagacgacggcaacattgtcaagctggttggagaaacggtcgcgaatgtagtcgaccagcaccggcatagcgataaggtggtcgacaggaccgtcgaagaagccttgggactgcgccgcatgcaggtcgacactcatgatgcggtcggcacctgcggtcttcagcaggtcgaacatgagacggcaggaaatgggctcgcggccgcgatgcttcttgtcttggcgcgagtagccaagcagtgggcagaccgcggtgatggaacgcgcggatgcacgcttgagcgcatcaatcatgatgagctgttccataatcgattggttgatcggggctgcgtggctttgcagtacgaacacgtccgcgccacgcacggattcggtgtagcgcacgtacatttcgccgttggcgaagtcatatgctgtggtttccagaacatcaatgccaagttgttcggcgacttccgccgccagtttcggatgtgttctgcctgtgacaaggataaggtttttatccggctttccttcaaggattgcgctcaccatgtctccaaacgtctgttttcgcgtcaagtggacgtgacccatattaaccatctgcgcagaccgtctcacccgcgcgtgttcacctgaaatttaccggtacagtccgtgcttgccaatatattgcaccacgccgtccggtacgaggtaccaaacaggctccccatgctccgcacgtcgccgcacatcggtcgaggaaatcgccagtgccggtatttccaacgtatcgaccttgccttccggcagtttcaccccttccggcgatgagtacccggggcgggtcacggccacgaagtgagccagatcccacattttgtcggcgtctttccattgcatgatttccgcgaccgcgtcagctccggtgatgaagaagagttccgcgtcgggatgttgcgcacggatgtctcgcaacgtgtcgatggtataggtgactcccggacggtcgatgtccacgcgtgatacggtgaatttcggattggacgcggtggcgatgaccgtcatgagataccggtcttccgcgttggtgacgttcttgtcgagtttgaatacggggcgtcccgtcggcacgaagatcacttcgtcgaggtcgtacacccacgacacttctgaggccgccaccaagtggccgttgtggatggggtcgaacgtgccgcccatgatgccgatgcgaggcctgctatgccagttgccgcgtgctgaacgtcggcctgtggccaccgcggaacctgctgattccacggaaaggtcggacatgcgccgttccggttccaccacatagctgatggcaagttcggaatcggcttcggcggattcgggccgcatgcgtttcgggccggtcatgaggcatcctcgtttttttgttcctgatcggcgtccgcggtctcacggccgatgctgtctgccgttggcgatgcgttgtccgggtcgattttgcccatatcctcatcccactcgtcctgcacgacgcgcctgatctccgcgaaagtcggcagagggaagtccggctgataggcgcgacgcacttccgccacacgttcggtgacgcgaatcagcgtatcggtcatgccgtcaatatcctgttcgcgctccatggcgctgaatttggcgatgtactgttccatgagccgcatctgctcatcgacgcttttaagcttctcttcgtcgagttccaccacgtcttcggcatcgacttccggccaaccgatcagcaccgcgtcggcgtattcgagtgaagcacgctgtgccgccgatgcgatgccgtcctcgatctgcacgagaaacacgtatcgtacgatgcttaatcgttcggatgcgagcttcaatcccagataggggtcattgagatccgcattccatgggttcttagcgtcagtcattgtttcctccatctggccgtcattattgttgtgttcgttcatgcccgtacctggcctgttccgtagccgatccacttggtcgtggtcatttcgcgtagtcccatgggcccgcgtgcatgcattttttgcgtggagataccaagttccgcgccgaagccgaacactcccccatctgtgaaacgcgtggacgcgttgaccatcaccaccgccgagtcgatgcgtgaggtgaattcctcaatggccgaatagtcttcggcgataatggattcggtatgccctgtggagtggcggttaatgtggctgatggcctcgtcgagtgagtcgaccactttgacgccgatcttcaacgcgagatactcggtatcccagtcttcctcagtggcatgtatcagtttcaccccgtcaataccggttttgtcgatgatctcgtaggcctgttcgtcggcatgcacttcgacgtcggctgcggcaagcgctgtggcgatttgcggaaggaacgcttcggcgatgtcactgtgcacgaggagtttttcagtggcgttgcagacgccgacgcgttgcgttttggcgttgagaatgatggggatggctttgttttggtcgccggttcggtcgacgtagatgtgtacgttgcccgctccggtttcgatgacgggtactttggagttttgcacgacggcttggatgaggcccgctccccctcgtggaataagcaggtcgatgtggccttgggcctgcatcatggcgttggcgccttgacgcccgtattcgtcgacggaagcgatgagtgcggcatcatatccgtgttcgtgcaatacgtcggcgatgatgttgagggtggctgcgttggtgcgttcggccgcgtgtcctcctctgaggagtgccgcgttgcctgatttgatgcagagtgacgcaacgtcgacggtgacgttgggtcgtgcttcgtagatcatgccgagcacgccgatgggcacgcgggtttgttcgagtcgcagaccgttgtcgaggtggtatccgcgcacgatttcaccgatcggatcctgtagggtggctacgtggcgcacaccttgtgcggctgcgttgacgcggggtacgtcaaatttgagccggtcgagtttgcctgcgtccatgccatgttcggcggatttctgcatgtcgatggcgttggcttccgcgatttcattggcgcgcgcgtcgagtgcgtcagcgatggcgttgagaagttcgtttttacgctgcgtgttggtttgggcaagttgcgcttgcgcgattcgggcggcgtcggctttggcgcacacctcgttgagcacatcgggctccatggcgttggattgggtctgtgggttcgtcatagtttcctagattagcgcgaaatcgcgccttgttccgtagcttcgaccattatttcgtcgtagcatcggaaacagggcgcgatttcgcacgtcacgtgtcctcagagatttatatccgaaaccgttctcgatcaaccgttattcgacatggaatcagtggatctgatcgagacccggatacagcgggaagtcttcggcgagcttgtcgacgcgagccctgagggcttccacgtcggcatccttgcctgctgcgagtgcggttccgatgatgtcggcgacctcttcgtattccttgttgccgaagccgcgggtggcgagggcgctggtgccgatgcgcagaccggaagccacgcttgccggacgcggatcgaacggaacggtgttgcggttgatggtgatgccgcactgggcgaggaggtcttcgccctgctggccgtccatttcgctgttgcgcagatcaaccatgacgaggtggacgtcggtgccgccggtgaggacgctgatgccgttgttcttgacatcgtcggacatgaggcgttcggcgaggatcttggcaccgtcgagggtgcgctgcatgcggtccttgaactccggagaggctgcgaccttgaacgcgacggccttgcctgcgatgacgtgcatgagcggaccgccctgctgacccgggaagaccgcggagttgagcttcttggcatagtcctgcttggcgagaatgaaaccggaacgcggaccgccaagagtcttgtgagccgtggaggatacgacatcggcgtacgggaccgggctcgggtgcagtccggctgcgacaaggcccgcgaagtgtgccatatcaacccagaacttggctccgacttcgtcggcgatttccttcatggccttgaagtcttcgatacgcgggtaggcgctccagccgccgatgatcatggccgggtgggtttcaagcgcgcgctggcggatgatttcaggatcgatgcggaaggtttcaggattgactccgtaggcttcggcatggtagaaacgtccggagaagttgattttcatgccgtgggtgagatgtccgccatggtcgagggcaagaccgagcacggtgtcgcccggcttgacgagcgcctggtagacggctgcattggcctgtgcgccggagtgaggctgcacgttgacgtattcggcaccaaacaggctcttggcacgctcacgggcaatggtttcgatcttgtcaacctgctcgcagccaccatagtagcggcgtcccggatagccttcggcatacttgttggtcagcacggaaccctgagcctgaagcacggcacgcggcacgaagttttcggaggcgatcatctccaagccgttctgctgtcgagacaactcagcgttgagtacctcggcgatttcggggtctgcttcggcgataggcgcgttgaacatgtcgttcggagtttgcgcgagaggcgatgcggtcattgagctctccttggcttggaggataaatacgttgcccgtacgaacgtgcaggcttaacgatgaagtgtacgtgcacaaatcgcatgagggaatagggcgtttcgaaacatggaagcaatcacgaaacaagcaggaaacaatcaccacccataaacacgcatcgtcccattccacggacgccaaacacgcttcttcccgcccataacgctacactcaatattgtttgacgttcattgtccgttctattgctaaggaaatccagtgaccacgttccacagcactcgcagcaccaccgattcactcacctccaagcaagccatacgcaaaggcatcgccgacgacggcggcctgttcgtaaccgactcactgggcgaaacccacgtagacgtcgcatctctcgcaggcaagtcctaccagcagatcgcattcgacgtgctgagcgtgctgctgcccgacttctccgaaaccgaactcaaggcatgcatcgatgaagcgtacggcgcgcaatggtccgacgaaaagatcaccccggtcaagccgctcggcgatgactacgtgatggaactgtttaacggcccgacctccgcattcaaagatgtcgcattgcagatcctgccgcgtttcatggcacgcaccaccccggccggcggcgacggcaacgagaaaatcatgatcgtgacagccacctccggagacaccggcaaggcggcgctcgctggtttcgcggatgccgagggcacaggcatcaccgtgttctatccggaaggcaaggttagccaggtacaggaactgcagatgagcacgcaggctggttcgaatgtgaatgtctgcgcggtgaagggcaatttcgatgacgctcagtccgctgtcaaacgcattttcggtgatcgtgagcttgccaatcgtttggcttccgattcgcatgtggtactgtcttccgcaaattcgatcaatgtgggacgtttggtgccgcaggtcgtctattatttctccgcttacgcgcagctgctcgaacagcaggtcatcaatgtcggtgatgaggtcgagtttgtggtgccgaccggtaatttcggcgatattctcgccggatattatgcgaagctgttaggcttgccggtcaagcatctggttgttgcgtccgataagaacaatgtgctgttcgatttcctgacttccggcacgtataaccgtcagcgtccgttctatcagacgatttccccgtcgatggacattcttatctcctcgaatctggaacgcatgctgtattacatgtccgacaaggacactcgtctgatcgccatgctgatgaacgatttgaaccagtggggcgcctatgaggttcccgaaccgatgctggccaagattcgttccctgttcggcaccggctgggccgatgaggatcaggtgcgtgagatgatcgcggattgctggaacaagaaccattatgtgatcgacccgcataccgcgtgcggttattacgtgatgcagcagatgcctcgcgatccgctgacgccgcgcgtgctgctgagcaccgccagcccgtacaagttcccgcgcgtggtcaacgagtccttgggtttggatgcttccggcacggatttcgaatgcatggacgtgcttgccgaggcgaccggcactaccgctccggccgcgttgcgcggtttggagaccgccgacgtgcgtttcgaccatgtcgttgacatcgacggtatggaaggttttgtcgagcaggccgccaaagctctgtaaaaactctgtaagcgaagcatactttcacatcgttaaagccatctccatcggccgtccgcaatatgtggacggccgtttttcgtcaaggctgctacagttgcatgttcggaggcgaacgagcatgacagcaccaacgatacccgcatctgaatcggtacgacagaagcaaccggcacaacaatcgaaccagcccgaacagccccggcgtaagcatgatcgtctcatcacccgtgatatggcgttggtcatgcttgcgacgttctgtttcatgtcgagcaatatgcttgccaatccgatcgttgccggatatgcggaatcgttgggcgcggacggcatgctgatgggtgcggtggccgggtcgatgagtttcatctcactgttctgccgccctatcgcaggcaatctttccgacaaaaccagcaagcgcacacttgtggcggttggcacggtgctctatttcgccgccggactgctgtactatttcgcaaactcccccatcatgctcatcatggctcgcgtgatcaacggcgttggtttcgcatgctgctcggtctgcctggccacgtggatgtcgcttttgctgccgatccggcatatgggtgccggcatgggattgtatggcacgatgaacgcgctggctatggcggtcggaccggcattgggtattcgcgcgcaaaaatacatcggttatcgtctgacgtttttgagttcgctggtgctggcggtgatcatgctgctcgccacactgatggtgaagaatggcggacagccggtacgcaaaaagcagacttccataacggagaatccctccactgccgtagacattgacggttctgctagcacaaccaaaaagcatcgtttttcgatccgttcgattctagaaccgcgtgtggtgccgttgtcgctgacgttcatgatgtttgcgatagcgtatttcgcaaatcagtccttcatcgtgagttatgttcagtctcgtcatctgccggtatcatccgacctgtttttcatgttttacgcggtcgcgttattggtgttgcgactgggcttgcgcgacctgttcgacagcaagggcttccgtttctggctgacggtctgctcgttgggcatgctggcgatgctcgcatgcatgacgttcctgttcaatgattggatgctgttgttggctgcgattttcaccgctgtcggctacggtctgatgagttcagtcacgcaggcgcaggccgtggtaatcgcaggccgcgagcgcagtggtattgcgaatagtacgtattatgcgggtattgatttgggtatgtcggttggtccgtttgtgggtggtttggtgtatgggcatttgcctgctgtgtggttttatccggtgtttatgttggcgatgcctgttgcttggttgatttatttgttgtgtgtgaagcgtgtttcgcggtagttgttggcatcgtgtgcgaggtttctgccgtaaaccagtccaagcgcgtgtcgttctaactgtttttgcggtcggtcgtattttccatatacggcaatatgaccgaccgacgcccatcctggctcgtgcaaggcgtccatgccgaaggggagatgtcaggatcggtccttgccgccgtattccgttccagcctttccggctatttgacttggtggattttgttgcctttgaccatgtaggcacgtcgggccatgtcgatcatgggctggtcgaatcggctgtctgtgtagaattcgtccactcgaacgttgtctccgtagagttcgcggaatcgtttgggcttgttggtgttgaagttgaggtagtttacgttcaacgtgttgccgtcgatggtggacgagaccaaatgttgcacgccaagcctgcggcaggcctcgcccacggtgatgtcgaacgaggcggtgaggatcgcatcgtcttcgcgtggcttataccagggtttgatgcgcttcatgttctgatcccagaaggcgttgaccaattcttcgaattccaacgattcggcaagttcgcttaaatatccgtggcatagcttgcccacaccgtattccatttgatcgaacgtggctcgtccgagcttgtatttgatggcatagcgcagtaccggggcgatgtaccgcaatactttcggattgtatttggccgaaaacaggtacaggtcgaacaggctttctccgtcatagatggttccatcgaagtcgaatacacgcatgtatgcagctctcacttcctcgtatgcgcgcattcaatacgcgccattgcacctcatgctaaagtccgaaggctgattccttcttacaccaaggtgaacggccggcgaccgcaatgtgcacaaattgcacatctcaatgcacattcggttcatgtcacgtttggaaggaggaaccaccacaacaacacagtcggaccgctattcgccccataggagccgttcgcgctgctgatactcctcatcgaacaacggctgggccttcgtgtcgatgagcttggcgaattccagatcctcatctcgttccacccgatgctcagccatattccattggtcatggtacgtgtaacgcaatgcctcggcatccgttttcagaacatgcgaccggtaaaggtcccgttcgaatagaagcgtatcaaccagccatcctggctcgtccggaaacttactgatgccattgacgtactccgcacgatacgcgtcatggacaaggacaggcaacgcatcgatacgcaaaagctccttgaacatgataagccgtccgattcgaccgttgccgtccgaaaatgggtgaatcttctcaaacgtccaatggacacgggcgatctgatatggctcgtcctcaagtttcgtgcacatatcaaacagcctgtccataaattcgggaacatcctgcggcagcgcggtccttgtcggagtgacaggattgccgataaagttcggccgagtcttgtagccgcccacgttgaaaagcgagtcggagacctgtctggtgccctgcttgagcatggcatgcaggtgacagaccatatcccggtccaccggctcatcagcatggtcgagaatccaacggaacgcagcaaaatgattacgggtttccaacgcatcatcaggattgacctgttcgctgccatccgtggtataggtaccggtggcaaatagctgcgcggtctgtttggcagtaagggtggaaccttccatatgattggaattccatgcgaactggatttgcgtggtcgtgtaaatgccgtcaccatatcgagtatcacgctctcggataagacgctccacgatacgctccgccataaccccatccttccttcattccgctcgactatcctcccatggtaattcattttaggctagaaaccgtggtggatgtcgtatatcctgcaggttggttccatgtcgaacgtgaccgtgtcgaactgttcgggatggtgtacgaacgtatcgatcagtttccattggcgacggctgatgccgatacgatagtccgggcggaccataagcaccggcgctttcggctggagttcctccaagagctgcgcgcgctgttcgaagcattcatcatcgtcgatccatacgatcggcgcgggttcattctcttcgcattcgatgcgtacgcgtcgttggatggtctgccatttacctgcctcacgtccccatttggtgacaggatcgtaccaggtgatgacatcgaccagcatgggatcccatccgagcatcgggtcgagaatctgactgcagtatggctgccaggtggacagccaccacaatttcacaatgccgtcaactgccaacgcgtacatggcgtcggatagttcgctggaccagtggatgcgccatgagcctacgggcgtgtgggctttttcgttgccgtccaggtggaacgctttttcaggattgtacattttcgcgtagggactgtcgggcttcgcccaggtcataactttgttcacgccgcccctgcgcaaaagcttgtcatccggaaaggcgttgagcaccccatcgaaatccgtgaacaccacaggcttggaaaacattttcaaatccgtcatcaccactcccctttcaatcatcaactatcttcttatattgaccttacggtttcctcattacgttttacctgacaaatactgacagcaccgccatcgttttatttgctatactcggattggttcggcacggacgccgaacgaccgcaggcacgaacataggcaaccgcaaacatggtccatagatgcgcaaaacatgatgcgcggacgcatccaaaaaagcggtcaccatcacgcaaaggagcgaaacatggcagacgaatcatcgaagattccagagaaaaccgtcgaacaaatcttcgacgaacgttatcccctcgacaaatgggaagattcaaactactcgatactcgacaaattctcaatgcgcggccgcaaaggcttcgtcaccggagccgcaggcggtctaggacgcaacgcggcggccgcgctcgcccaagccggagcagacgtcgcactagtcgacctgcccagccaagaagacaagctcaccgaactggcgaaagacatgagcgaacgtttcggcaccaacgtcatcgcgctcacctgcgacgtcaccaacgtcgaacaagtagccgaactcaaaacacaattggtggaacagctgggcaccgtcgacttcgcgttcctcaacgccggagtcaacgtaccgggcgacgatcaagacgccaccgaagaagtatggacgcgcaccatcaacatcaacctcaacggcacctaccgtaccggccgcatcgcgcatgaaatcatgcgcgaacacggtcatggcggctcactgatcttcacagcctccctgtccggacacaacgcgaactacatgatgggaagtccgacgccggtgaacgcgtatggcgccaccaaagcggccatcatggaacactcacgttaccttgctgccgcgctcgccaaggatggtatccgttccaacaccatctcccccggatacgtgtggtctggaattttcaatggccgtatcgacatgcctggccacgacgccatgctcgaggtcgtgccgatgcatcgtttcggcacgaatgacgagattgccagcacggtgctcttcctcgccagcgacgcgtcctcgtacgttactggcactgacattcgcgtagacggcggctacagcgtcttctaatcaccgtaccccatctgataaatggccggtcgcagctaatgtgcttcgaccggccatttatctggtgatggtttctagaacataccgctacacatgcttgcggcgtatcaacgtaccggcagtggttccggctcctgcaaggagaagcatgaccgcgataatgggaacgatgtcggagcccgtgcgaggcaagtccgcagtcggttttccatcggccttgctggcattcttgtctttcgagggctgcttgtcattcggcttggcctcgccaccgcccggctggtcatcaggcttcgtttcccgaagcttcagaccgtccaatgccgtgttaaggagcgtggcggcattggagacaagaccgttctgttcgctgctgaacgtggtgttgttccacagcgagaggacctgctcgtacgcttccgtgagagatgcgaccgtatcgtccgtgtatttgccgaattcggcaagcttggcctgtgccgccgcgatcggagcttcgagcgcgctcttgtcgagttcggtcggatcatcatacatggcctgatatcctgggatggtcagtttggcgagctgatcgtacatcttggagcagaggcgagcgttgaagttcatgacactgaaccctgcgcgggacaagttcatctgtcggatttccagattgtctggatcgtaggcgccttcggcgaacgtcatgtcggccgattcgctgtcggacgcgcccttgcctgttccgctggtgtcgagcgcgctgcccgtggagtagtcgaacggggtgccatccttgccgctccatgcgttgatgatgaggctcgacgtgcggaacgggtcagatccaactcctgcgtagttgtagaccgcaatgtccttgccggaggaaacggtgtcgccgttctcatcgacgaagtagatcgggttgccgtcgacgtcgagcggatacccgtcgggaccccacacgttgtcggtgatcactgcgagaccgtcacggtcggtatagctgcccatgcgggattcgcgatgccatgcgttgccggtcgtggccgtcggatgcagaaacagttcggctccggacgcggcataataacgaccgagttccggatagaagtggccgtctcaacaaatgtcgataccggccttgagcggcttgccgtccgagccggtccactcgggcatctcgaacatgaccggcgtgctgccaggcaacgaccatgcggtttcctcggatccggcgcgatgcatcttctggtaggagtcggtgtgcccgtcagggaacgctatggcggcagaattgtagaccttccgcacgccgtcgctgtcggtgatgagactctcggtgatttcagcttgggaggccgccatcttgtatgctgcggagtctaggtcgcttgaggaaacgtagccggtgagtgccgcgacgaaggccatggtggcgcacaatgcgacgctacctaccgccgcaaccgccatgttgagctgtcgtttgaaccatatggatttcgcggtgacgttcgctgccgcgtctttgttctccgttgtcgtacggtgcgacgtggatgtccctctcttcaacgcgccatgcttccccgaaatttccccgttctggaaaacatcataggagataaacggaattgtatgaccgttcgttttccacttggcttctgaattccgaagagtagctaaagagtactcatgcccgattctgcgagcgcgatcatttgacgtttcctttgttgttgaacaccgttttgctcatatctcgcttatgtatggcagatttgcgaacttgtccggagatatcttgcttatatatggcaggtcagtccgtcaaagcagtaggtagggggcatgaaaaacctcattttcgcgaaaccgactgccatatataagcgagatgcctcatgtcacatcccgaaatctgccatacataggcgagatacagcctgctttgctcagcacaaggccgacagatccagaaaatgcgcacgatgacacgtttcaaaccatacttcgcgcaggatctttttccgatttgttcccttgacaggtctgacgcctactgtttggagttcgcggcggcgcgcaacgagtcaacgaactgtgcacacgcaaaggcgggtatgatgacgtttattctcgcttggtatcggcacttgaaatccgaagaacagtaaggagataatcatgtccgacatcaatccgtcagtagcctcggcagcacagaaccctcctgcatccgcacgactcgaagcaggactaacggccccggactttacacttcccagcgacaacggcggtagtgtcacgctctccgcattgcgcggccaaaatatcatcctatacttctaccctgccgcgatgactcccggctgcaccaccgaggcctgcgacttccgcgacaacctcgcacgcctaagctcccgcggattcacagtgctcggcgtttcgaaggatccgctggacaagctcatccaattccgcgagcgcgaccatttgacgttccccctgttgtcggatgctgatttgactgtgcatcgtttgtatggtgcgtatggtgagaagaagttgtatggcaaggtttatgagggtgtgattcgttcgacttttgtgattgatggtgatggggtgattcgtgttgcccgatacaacgtgcgcgcgaagggtcatgttgattctctgctgcgtgcgcttgataagcttgatggttctgttttctagtctggagtgcattgccgcttgctttttagatcagctttttcgtgcgaatgacgcaagcagcgtcagtagcgggtagatgccgaattcctgatagcggtcgtgcagtgtgccgatgtcttcgaatatggtctcttcggcgagcctttcgaaggtctcgtaactgcgcggggcacggcctcgtatgagaagaggagaagcgcgatgagactcagacttccgacaataaatcatcgtcttccgacatgtcagcccacggctcgcgtgtgcggtttgcttgatcgtgttggcggtgcgttggctgaggaacgtgaacgtttggagttgaaggcgattgaaatgctgaaggagccgaaacgtcttgtgcagccggagccagtggatcatgcttggtgggatgatggttccggcgtgtacagcatcggctgagggagccggtaggctgggtgtgtaaatccagcagagaggaacgtgccatggtgacgcgtcgtaatgatgagcggacggttgcgggaaggcatcgcatgatgaggcgtgccgaccgtgaggtaaccgaaccacagcagatcgatgcgattatcgcaacatgcaagatcgtgaatattgcatacaccgatgcggaaggcatcaccatcgtgccgttgaatttcggatacgtgttcgatgcggaatccaatcatctcaccttgtatttccatggttctgcgaccggacgtaagatggacgcggtcaaggccgcgaacaacgcgcttcctgtagcattcgaaatggcgaccgactgcgaggtggtcgaggggcgcacgctgtgcaattggggcgaggcgttcaagtcgatcgtcggcaatggcaccgcatccatcatcgacgatcttgacgaggcacgccaggggctcgcactgctgatgaagcagcaggccggcatggaacatgcggaattcaccgaccagcaggtacgcgccgtcaccgtatggaaggtggaagcggactacttcaccgccaaagtacgcgaaaagccccagctgcatacgcactgacctcataccgcaccttgacgcaatgatgcgctgcttccaagcccgaggatgggaattgggaacagcgcatcagatgtaaaacgctagaccgaagtccggctgcggccaagttgcgagtcaggccgtaacccggtcgagataaggtttcaaatcaagccttccggcgggaacgccgcgcgtagcttcctccaaaaatcgcggaggacaccatcacgacggtcgccacgatggcgggcgtcacgtttgaaccggttttggcgagcttgaccgcatcgccgccgttcgcggacgatttcaccggatgcttccgctggccgttcgcatcattcgcacccggagccttctgcgaatcatctggtgtcgattcatggcccggcgtttcaggctgaccttcctcatccgtcagtcgggcatcaaccgtggttcccttaccattcaggcagcttttcagctcgctttccttataccaggtcgaaccatccgcaattggcgtgcaggaatcgttgaatccgatttccttctcgttgtacagcattctgaccaacggctgatacggctgccccgagacgtccgtaccatcacgcacgaccacatcccactgcacattcgcagccatcggcgtcacactttcgccacgccacggattattctcatacgtgtacagttcactcgcctgctgctgcgatccaggcagcttcagcaataccgcaaacggaataatggtttcggcatgtgcgaatcggaacgtcgcggcggtgccggcccgctccctcgtgtcgatcgcattgaagaaatcgtcgagcaacggctgggcaatgcggtaggtctcatcctgacctgcgcgccccggtcccttctcatagaagtcctcggcatcaagcgaccaagcaaacgtcttcgcctcctgggcgtgctgaccttggaagtactggtcgaaattgaacgtgtgggatccggtgttctcctgttccatatcggccgcgatgatgtacagattgtacaaatccattgccgcgtcctgttccgacgcgatcttcttcttggcgtcaccgcacgcgttcgcatccttggcagggtcggcgccagcagcgcaattggccgcaccctttttcgtgccgtcagccgtgttgtaccagatgcgctggccttcctccttgccgatggacgcgaggaaatcgtcagtgaagatttgagagagcagattatgcgaagcggtggtcatggacggatcgttcgtcacgttttcctcagcttcggcgatgcccccatcattcgcgacgaactgctggtaacgttccgcgcgctccttggcctcgcccgttttctgcgtaccatccggattatcagtcttatggaaatacaacgtggtggtgttcttgtcgaaattcttgccggaattgttatccgcaggattattcggtgctacaaccgcattcgccagcaaaccgttggaagcctgatcgaatcctagtttgaaattctctccggattcggttgcacgaggctcacccgagctctggtatgagacgcgcagtccctgctttgcggcattggcgaacagatcagcatcacgctggtatattctctcaccaatgccctgatgctgtatggcgccctgaccagagagcatgccatacccgttgcccacgttgaccgcagtaatggcattgacattgttgatgaattccttgccaacctctgggctaacgaatccagcataattgttttccgcagcagactgagccatcagtgccagcaaagcgtcatacttgtagctcgacaggccacgcgagccatgccttgccacagactcggtgtatgcaagatggtatctgctcggaattgctgaatatgatgtgctcgccggtgcaacatacggctgcttgctgctgtaataccgggcggttccttccccagccaaagccgctggcgttgcgagcatggccgctgccactacagcgcttgtcaacgcgagcatgccaccgcccaccgatttggtaccgcgtttgcgccaggctcctgcctgccgctgttcctttgttgccgtatggtttttcgccattatcctcattcttctacctcttctgctttgccacattgaagctgtcagacaagccagcccgggcgacaaaataggctcggaaggcgaacacgcaacgccttaaacgtgaacgatcgacaaataatccgcgaaccgtcgcttagaactcaagtaagttgcacagccgcaactcccccaccccatggattcacgatgctcgacgtatcacagaacctgctggacaagttccaccgatttcgctgcggacacccccaatcaacgcacatcattatggctggccgattgtcgacttgacacgtggaaacgtccccgcctttcacgtcaggaccgaaaacccaaagtatgcaagaatccggacgttacaggatgcggacgttttcttggagactgaatgaaaggattatcgtatgttcggtcccgaggaacgacggcgcggaggggtccttcggacgcatgaagatggagtccgtccatcccgggcattgggaggaacgtacccacgacgaggtgctcgtcccggtcgacgactgcatccgctggtacgaccacgagcgcatcaaacggtcgctcggttggatgagtccggtacaataccgtcagagccagggaatggctgcgtgatcatctccaagaaaacgtccgcagcccctctgccatttgcgatcagtcatggcacgctgattccaatgggtttcagcagtacgctggatgacgcattatcgcaaagcgtcgaacacgccatcaatatgattgccgccatgttcgagatgccacgtcaacaagtgtacctgctgctgtcggctgccattgacttcaacgtgacgcaagtcgttgatatcacaccaaaggcgttcacggtctgattgatctgtcgatgtttcaacaactacccgactatgaacggacgatacgcgatattgggaacagcagatggactgccatgcggcgcatgccttattggcccagcaggctcagacaagtcactgattggtctagccaaagaactctataagggaatggaataacagatggtttccccaacaaacaatcatgcagcaagatagcaacaccacccaggcgacggatcgcgccgaaacggacgctctctccttcggcgcgaagaaaatcgcaatcatgattggcgtgggactcatcgccggttccctacactgcctatgttgatgaccatgccgttggcgtagctgatctacctgtgtttccgccgtatcatccatccgactcgcgcataaccgtccatacgggaatcctcgaacgcaagtaaatgtcgcttccgtcaatcgtcgaccgcaagaggcgttcatggagcggcggatttccttatattccaacaaaacccgtactgttatgcgacacgtaataacagtacgggttttctgtgttactgttatatataacagctaaacagtttgcatctaactgttcagccgggagatatatcacctacgaaacatacagaaaaagaggcacagattgaagctgatcatctcatccgtgtccggagaaccgatttacgaacagatcaagaaccagatcaggtccgcgatcatgtcgggtgagcttacagcaggcgaggcgcttccctcactgcgcaagctcgccaaggaactgcgcgtcagcgtgctcaccgtgaccagagcgtataacgaactggccgacgaggggctcgtggagaatgtgcagggcaaaggcacattcgtgatggaacgaggcaacgaactcatgaaggaacgtgcgcgtgaacgcatcatggacaagctccgtgaagtttccatcgaggccaaagccgccgacatcagcctacttgatctgcttggcatgttcgagaaagcgtacagggaacaatcatgaacgattcctcactcccccaaggaacgcggccaaccttggccttgagcgtaaccggattgacgaagcattatgattccggcttcacattggatgacgtgaccttcgacctgccgtccggctacatcatgggtctggtcggtccgaacggagccggcaaatccacgttgatcaaactgatcctcaatatgaccacgcgagacgcgggacgaatcgaagtgctcggccttgacgcgatggccgatgaggagcgggccaaagagcagctgggcgtagtgctcgacagcagctatttcatcgaatacatgacggtcgacgcggtggaacggacaagcagcccaatgtacccgctgtgggaccacaatctgttcgacgcatatctcagacggttcggactcggacggaacaagaagatcaaggatctgtcgcgcggcatgcagatgaagctcatgctcgccgtggcgttgagccacgatgcgaaactgctgattctcgacgagccgaccagcggcctggacgtactgtcccgcgacgagctcatggacatcctgtccgattatgttgcggatggcggacacagcgtaatcttctccacgcatatcaccgccgatttggagcgttgcgcggatttcctcgcgtatataacgaacggcatgctgtattacagcgggccgaaagacgagttcgaagacgcgttccgtctggtcaagggcggtccggatgagcttactgatggtctgcgacgggcaatggtcggcatccgcacatacgcaaccggcttcgacgcgttggtccgcacgcaggatatcccacacatcggcggcaccgacggtctcctgacacagcatgcttcgattgaggatgtgatcagactgaccaacgccgcggcacatacggcaatcggcaataccaacgaaggagacgtacgatgaacacgacagcgaacgcggacgccatgaccgccatccttaggcagatttccttggactggaaccgtaccatcagctacgggcggtcgtacatagccatcttcttcgcgtacgttccaggtttcacatgcctgatggcggctacagggtccactctcgacagcgttgcgggagccgccatcggcggggcggcctccgtcttcctgatgcttaatatcaccctgttctcctatgaacaaatgaacaaccatcattggatgaacggcatcgtgcccatcaaccgcaaccaccagatcctcggacgattcgcattccttatcgcctgcgatctggtggcgggattggaagtggccgtcagcatcgcctgcgccggcaccatcatgcacgagccagttaaagtgacggatgcgatcgacttcgccgcgatgaccgtgctgaccctcgtactgctcaacgccatcgtgcagccgttcctgtaccggttctccccttatcgtgccatggccgccattattctgagcatcggcgtgatcgtgggcacggtcatcggactgcgcaaggcattgccggaattcgaaaagaccgtcgaacagctggccgaagcgatcagccggcaccaagccattgcattagcgacattcttgatcatcgacgtactcgccttggtgttctccagcaagatatcgctgcatatttacggtagcaaggacatctgaaccgagccagccggtaaactcttatggaacgtatttggggtcttccgaatcaacggaaagccccaaatgcatatatccccgcacgacgccggttcctacaatacggcaggcgcgtcatggaagtcgaacatgacaccatccgccagaccgcaaatagccggccaatcggcatcggacgaatcgtcgtgcatggcccataccttcatgccaaccgacttggcggaacgcatgccgatcagcaaatcctcgaacacggtgcactcccccggctcgactccgaggcgagatgcagccaacagatacacgtccggctggtctttgccgacgtcgccggcatcatcgacactgaccacttcatcgaagtagtcgaaaatgccaacatgcttcatcgccggctctctcagcatcggcggcagcgatgtggcaacggcaagtttcgctccactctctttcaattgagcgagatattcacgtgcatacggtttggcttcgaccactgtggcatacatgacgcgggccatatgatcccactcatccatcagctcttcgggagtgtcagtaaggctgaaacgcgcaatcgtatattcggcgatctggcggaattgcatggctgcgactttcgtcatgtaatcgtccggcacgtcaatgcctcgttttgaaagaaaatcgatgtcaacctgatcccaaacgcccatggaatcaagcagcgtgccgtcaagatcgaaaatggcgcccttgccttgattgcctgccatcgatatcctcctttattattgtgcatcttacgttaatcgagaaccgatgatttgagcagttcttcggcatgttccagcgaagcttcgctttcactgccggagagcatgcgggcgatttcgtgcacacgcgcctctccacgcacttgattgatggtggtggcgattgatccgtcatccatttcacctttggcgaccacgtactgttcgtccgcccaggatgcgacctgtggcagatgggtgacgacaatgacctgcgcggattgagcgagtttcgccaatcgcgcgccaagctccaccgcggttttgccaccaacgcctgcgtcgacctcgtcgaaaatgaacgtcatgggaggtacggaaccgcccgccaccacatgtttttccgccgcaacgagttcaagcgcgagcatgagccggctcagctcgccgccggacgcgcttttgcccatcggcatttgcggagaacccgggaacggcgtgaacagaaaatcgatgccgtcagcgccggaagcgtccaaatgttcacgttccgatacacggatctctagtttcgatccgctcatggcaagagattcgagttccgcagtgactttggcggcgagttccttcgcggcggcggcacgtcttttgcttaccgcacgcgccgccttcaacgcctcaccgaacagtttttcacgttccgcctgcaattgactaactttttccggagatgcatccaagtcttccaagtcgaacaccgcttgatccctccacgcgatcacgtccgacagttccggcccccaacgacgaaccaattcgtcaagctcatggatacgtccattgatggcgtccaagtcttccatgccgagatcattgtcgacttcgcccgacaaggtaaacaccacatcagacaaatcagtactgatggaatcaagccgatcggccaattccgaaaacacgccgtccacgtgaatggcacgaagcgcctgcgacgcgcgatcaatcagatcggtggcgctggatgattcaacatcgtcaacaacctgcgaagcatccaacgcactcaacgcacggttcaccccttcggcaatctcggccgcgttctcaatgcgatcacggcgagcacgcaactcggccatctcccccggctgcggatcgatgcggttgattcgttcgatggactcgcgcaggtagtccgcctgctgacgcatggacgactcctggctcgacaatcgctccaaccgatcatccatggcacgaagcgcattccaagctttgccgtatgcgaccaacgccacatcatcgccggcatagcggtccaaaaactcacgttgccgcgtcgaagatgcgatacgcaactggtccgcctgaccatgaatcgtcaccaactccgctgcgatcgaccccagtacggaacgaggcacgctacgaccagacagcatgctgcgggagcgcccggaggcaggcaccttgcgcgacaggaacagttctccgtcttcaggttcgaaacccgcctcgtgcgcggctgcgaccgcggccggtgacgaggcgacctcgaacacgccctgcgcccacgcttcgttcgctccgaccgacacgcgcccaccgtcggaaggaccgccggaaatcagccgaatcgcactgagcagcatcgactttccggcacccgtctcaccggtgatcgccgtcataccgccggcaggcgcgatcagcgcggaacggatcggcccaagattatgaatctcaagttcttcaagcatcagtgtttttactcgttcgtttctttatcttccggaaacacatgcccatgatgcactcccccggttttacgcgcctgctcgcgccaaccgacaacaggaagatcgaatttcgtgaccagacgattcgtgaacggcacgccggaaagacgggccaggcgcaatgtgctcttcgattcgcgcacctcaaccctagtgccccgcggcaacgcgcattggcgacggccatcgcagcagatccaaccatccgacgtggaatcctcaaggatatcaatggcgaatgtggaaccggagccaataatcaaggggcgcgcgaacagggcatgagcggccaacggcaccaactgcaacgccttcacgttcggccacatgatcggtcctccggcggagaacgcgtatgcggtggagccggtcggagtcgacacgatcacgccatcgcagccgaaggagctcatttccacatcgtccacacgaatcgacagttcgaccattttgccacggtcggcacgctccaacgtgatgtcattcaacgcccaatcctcaatcggctcgcttgctcccggcagccacacgtcgacatgcgcaatcatgcgttcgtcaatggaataatcatgctcggcaaccctgcggatcgcctcactcatctggaagctttcaaactccgccaaaaaaccgacatgtcccaagttcacgccaagaatcggcacactggtgcagtgcaccagttcagccgctcgaagaatggtgccatccccgccgagcaccaccacgatctcagtgcgttcggaaaccaccggcagctgcttgccgaaatccggcgcctcgatattgtcaatgatcgacacttcgaaaccggcctgggtcagctgcccgacagcctcctcaaccaccgtgccactctccctcagacgactatgcgtcaccaccaccgcatgacgggtaccgaacatcgttaatccctttccagcaaaaggaaacgccctatggaaaacgcccatgaagacgtcaccgacctccagtgtaatcgaacaaatgaacgaaaaccggcaatgcgcgtcgaaaacatgccaaaacccgcgaacacgcctcaaatccgtctccgatgcaagccacgaatcaggaatgtcagccgtcaaatagcctgttagtcgcacatatgcttacaatagctcacaggaacgaagaccgaacatcgtaagaaaaggagagaggaacggcatgtcaaacctcgtctttgacgagtcctcctccaatcgtaaggcctcacatggctacgcatggtggttctcgggagatactttcgagaaggccatagcggaagaccgcaagccacgcaagcgcggcctcacgcgccgactcgtcaaccatccaggccgtctgaccatcttctactttctgacgctcgcggcgttgtccactacgttgctgatgacgcccattgccacgccgaaagacgaaaccactacgttcaccaccgcgttcttcaccgcagtatccgccatttccacatgcggaatctccatcgtcaactccaccacgcattggaccaccttcggccaaggcgtgctcatcttcgccgtgcagatgggtggccttggcgtcatgacgttcgcctccttgatcgcattggccgtgaaccaccatctcaaggccacgcagcgcatgctgaccgccaacgaactcggcactacgaagctcggtgaaatcaaaggcgtgctcaccgtagtcatcaccaccgcattcgtcatcgaaggcatcacattcgtcgcattgttccccggcctctacaaggtcaaccacggtaatgtgcgccacacattgtgggaatcgctgttcttcgcggtcatggcgtacaacaacgccggcttcacccccgacggcgccggtctgcatgtcaacaactgggcggtcggcctgccgatcctagccagcgctttctgcggaacccttggcttcccggtattgctgaacctgatgcgttcctggcgtatgcgtcgtcctccgaagcgttggagcctgcacaccaagctcacactgaccaccacgttctgcattgtgatcgcctcgttcacgtggttcctgctgatggaatggaacaacaagctgctgttcgccggaaacggcatcgagccgcgcctctggcacgccatggtcgcggccgtcatgccacgaagctccggatttgacctgtcgtggatgccaggcgtcagcgacgcaaccaaagtgttcctgtccatcgtcatgttcatcggcggtggcagcacctcgaccgcaggcggcatccgcgtcaccacgttcgcggtgaccctgctgacctgtcgtgccgcattcaccggacgccacgacatcaacgcattccaccgccgcatccacacgcaggcggttatgaccgccgtggccgtaagcacggcatgtctcatgctggtcaccgtggtgtcgatggcgctgatgatcatcaccggctgctcgctgtgcgacgcactgttcgatacctgctccgcgttcggactgggtggctactcggtgggcgtagccagtgaaagcagccccacggtgctatacattctcgccgcaaccatgttcatcgggcgtctcggaccgctcaccatcgcctacgcgatttcgcgtccacacaatctcgaggccgtccgctaccccaccgagcagatcgtggtcggctgacgatacggcttcatatacttacagttgcctgcaatcacacatgaatatagatttttgaagatggaatttcgaaaggtgcataacatcatggccaacaacaccagaagcgttctcgtagttggtttggggcgttttggcagctctgtggccaccacgctcgacatgatgggccaggatgtgctcgccgtcgacaaagacggcgaactggtgaaccgttggtcttcgcagattcccaccgtgcaggccgacatgaccgatgtgatggcgttggagcagatcaacgcatccgatttcgacacggccgtcgtggctatcggcgacagcgtcgaagcttccgtcattaccgccggcaatctgctcgacgccggcatctccgacatttgggccaagtccgtgtcgaaggaacacgcccgcattctgcaacgcatcggcgcacgccacatcatcaacgcggaaaccgacgccggcaaacgcgtcggacatcttgtgtccggcaactatcttgactacatcgagcttgaaggcgcgtacaacgtcgtcaaaatccatacccccgcgcatgtggtcggctacaccatcgaagacgctcgcgtgcatgaacgcttcggcattaccgtggtcggcatcaaatcgccgggcaaggaattcgaatacggttcgaaagagctcatcatgcaccgcaacgacgaactcatcatcatgggcaagcagaatcaaatcgaccggttcctacgcagctgacacgctctttccatatggaaaaatccggaatttcataatcatgatttccggtttttcttttacttatcttatttgccttgattacactgcagacacggttctctcaaccggtcgctgtttcactgcatgaccgcgtacagcagatattcgatattgccatgcgtgccttcaatgggagatactgttgtggcgcgcacgtcaagcccgttgcgttccgcgcatgccacgacggaggacagcgcctgttcgcgtaattcctggctttcgacaatcccgtttttcccaaggttgcctttgccgacctcgaactgcggtttgaccagcagcacgatctgcgcctgcggtgcggcgattcttgcgatcaccggaatcacatatgtcagcgaaataaacgatacgtcggaaacaatcatttccggacaatacggcaaatcctccgcatacacgtcgcgaatattgacgccgctcatttcgataatacggtcgtcatgcgcgattttcggatccaattgcccatggccgacatccaaagcgatgacctgcgcggcatcattgcgcaatagcacgtcgcagaaaccaccggtggacgcgccgatatccaagcaacgtaatccttgcgcggaacgcaatccgacgtcggcgaaccgttcgaacgcgccgacaagcttgtatgcgccacgggaaacgtagccgtctcccctatcggcggcgatgacgtcatcaccaccgactttcgccgatgctttggtgacggtgacaccgttcacactgactttgccatccgcgatcagacgttgcgccttggaacgactgtcggtcagaccacgttccaacaacgcaacgtcaagacgaacaacctgagtggaatcactgtttcgcaatggttttccaataatcggtacgaattgttcgttaggaaatacggaattccggaacgatcacgccactcacatctcgcccgctgtcggccgcggcccacatggcgcagcatgcggcacgcaacccgtcgacactggtgatgtcggtgacatacaggcggtcgccgtcaacgcgggccttcgcatcgcggcacagccatgcgccctcatcatgcaccacttcaggagcgggctcgttcaagccccgcagatctttggcgatgtaggtcgggcgaagatacgccggagcgaacatgagttcgcgcggatcggtgacgccggtcaacaccgcaagggaatcgtacccgccccgattgcccgcctcgatatcggtgtcgagacggtcgccgatggcgaggcactgttccttgtccaccggctcgccatcatcatgggctgcgagaatgcgcgcctcgtcatacatggcggattccggcttgcctgcggacgaaaccggttccacaccggtggcattgatcaccgccatgatcatggaaccgcatcccggcgcgatgccaagctcacgaggaatggtcagatcacgattggtcacgaaataggtcgcgccatgctcaacggcataggcgatttgggccatttcgttccaagacatgtcgggataccatccttggatggcggcgaccggctgcgcttctgcggaatcgacgacttcaagaccttgcttggccacttcctcacgcagatgctgggcgccaagcacgaaaaccttcgaaccttcaggcacggcacgtgccaccatgcgcgcggcgacaaccgacgaggtgatgacctgccaggattcgacatccaaatcgaaccccttcagctggtctgccaccacggcctgaagtcgggacgaattgttggtggtgtattccaccgccatgcccaaggattcggccttgcggatattcttggcagcatgttccaccgggttcttaccacggtagaccacgccgtcaagatcaagcagtgccagcgagtatgcttcgctgagcggctgattcgtggacttcagcatgcgggccacgtcacctcacttgttatcttcggaggattcggaagaagcatccgaagactcttcggcctcttcagcctcaccgtcatcatcggcgtcatcttccgcagcatcgtcagcttctgccggctcgtcatcggattccgcgcctgcttccgtctcttcggcctcaagctgggtttcgtcgttggtttcgccgttctcgtcgatggcttcggattcgtcttcctcattctcagggtcttccggagcgtactgcgcgtcatcttcggaaatgccaagcacgtccatgagttcgtcgttcagctcctgcatgtcgtattcgacaaccagatcgtcggaagtctcatcatcctcaacatcggcgtactgcagttcgagcttgtcgagcagacgatccaatgcgatggcctcatcggtacggccggcctcttcaaggaaatactgttcggcctgcaccgcacgcatgcggtattcgccggccaatcccttggaacggcccagcgtgtgcacgatctcgatggccttgtcccacatcttcagatcgcccagagcgccagcgtacaccaagaacatttcagccttggcttcaccgcgcagatacttggcgtcgtcgctcacagccacttcgatggccttcttcggctcgcccacgccacgctcgcagtcggcgatgaacggcagataatccaggaaaccgttcatacggaacgcggtgcggaactcacgcaaggcaagcttgtaatcaccctgacggtatgccacgaaggcgagtgtctcgcgggcgaaatcgatgcgggaagcctggcgggccacccacttggcatgttcgagggccagctccgggttgctctcctcaagcgtgtacgcggcaagaatgtgcagaccaatgttttccgcatgttccttcgacaggccacgcaggcgttcgcgatcgtcggtggtgagcatacgccattcgatgcccttcggcatcttcggctcatcaggacgacgatgcgtgtacgggttctgcgaggggaagctcaccgtgccatcggaattgcggcgcggcttggccatgtactcgccacgcttctcctcacggtaggccatcttctcttcgcgggtgaactcgcgacgctcctcgcgctgctgctggtcgcgatccttgtggaagtcacggcgctgatcgtcacgacggaactccttacgctcgccatcacggaaattacggcgtccgccatcacgacgatcattgccacggtggtcgtcacgacggaagttacgacgatcaccatcacgatggaaatcacggcgatcattatcgcggtggaagttacgacggtcgccatcttcacgacggaagttacgacggtcgccgtcacggtggaagtctttacggtttccgtcacgtcgatcgtcacgacggaaaccggaacgctcgccatcgcgctgatagcgaggattgtctccacgaccgccacgataatcgcgatgatcgtcacgacgctcgccgtcacggttgaacttgcgcggaccgttatggaagcgacgctcctggccttccccctcaccgtcacgacggaaatcgcggtcgcggtggaaattgccgccattgcccttgcggtatccgcccttatgatcgtcgttgtggaagccgccggacttgtggccgtaggacttgccgccattgccacgcggcttgaatcccttgccgccgcgatcgcccggcttgcccgagccgtaggacttgtggttgccgtaggacttgccgcgcgatccgcgctgttcttctgccatgctgttccttatattccttgtattccttgaaaatggtcttcgtttgttctttgcttacgtttgtttacgccgctcgcgattgcctcacacgttttcgacgacgccgagggccttcttgccgcgacgaatcaatgcgaaacgtccatgcaggaagtcattttcgttcaaaacctgctcttcgtctttaacacgggcgttgttcagatacacgccgccagccttaatcgtcttgcgcgcttcggaaatcgacttgaacagtccggccttcatgccggcttccgccacacggtcgcccaccgcggccttggcgaactcgccgtcgatcttcacgccgtcaagagcagcttcgagcgtggactcgtcaacgcccgcaagatcgccgccacggccgaacagcgcaccggcggcctcgatggcctgtcgggtggcttcctcaccatgaaccaggctggtgacctcccaagccaaggtgcgttgcgcctcacgcgcgcccggattggtcttgctttcctccacaagacgttcgatctccgccttcggcaagaacgtgaacaccttcagcaggttctccatctcgctgtcagggcggttgaaccagaactggtagaacttgtacgggctcagcatagtgccgtcaagccagacggcgttgccttcggacttgccgaacttcttaccctgagcgtcggtgataatcgggctggtgaacacgttcacatccacgccacgtaccttgtggatcaggtcaagaccggacgtgaggttgccccactggtcggatccgccaagctcaagcacgcaatggtattcgtcgaacaggtgcaggaagtcgttgccctgcagcacctggtagctgaactcggtgaaggaaatgccatcttcagaattcagccgacgggcaacggtgtctttggcgagcatggtacccaaacggaagttcttgccgacgtcacgcaggaagtcgatgacgttcatggaggcgatccaatcgtaattggacacgaaacggaccggattgctgccttccacttcgagaatgccgccgatctgcgccttcagacgctcggcccaaccagccacgacgtctttcggattgagcgtacgttcgcccgattggcgaggatcgccgatcaagccggtggcgccgccgaccagggcaatcggatgatggcctgctgcctgaaggtgacgcatgttgatgagctgcaccagattgccgatatgcagagaggcagcggtcggatcgaaaccgcaataataggaaatgggatctccgttcaacgcttcggcgagtcgatccctgtcagtggactgggaaatcaacccgcgccattccagttcatcgaggacggactcgaaaccggcctccttgaaatcgatgacgtgagccatagctgtgttttctccctattgaattgcggatgatactgcgttttacgcaccctacagtttcgcagaagatgaagacaggcgcacgcggtgtttccccatcatccaccaaccatcgtgcatacaggtaaagttagaaggagcatccccatatcaagaagggagatacctgcatggaccgcaaaggcatgaaggttgcggctaagaaagcccagagaaaacattattggatgatagtcgccatttgcctgttcgcttcggtgttcggtgttgcgtacacttcatcgacgctctcggtcagcaccaacatttcgatcagcaccccgcaaacggaggattccacgcaatccaacgatatgtatgacgtattgcaggatcttgccgtaggcaatgaaaacgatgcccgtgaaaaggtcaagcaaaaccaagagcagatcgtcaacaacgataccgatgccacgttcggccgtcgccgcggagtaatcgcgtccctgctcaactcgtttgcatccggctcgatggtgatcgccgtggccgacgccattaattccgtcacccataacggcggcgtctccatcgccgtgccggtaatactctcgctggccgtctacattttcgtctggctgttcattcaagaaacataccgcatcgtcatggcacgtatgctgttggaaggacgttcctataacaagcttccggcaagtcgcttcttctaccccattcacacgcgcaaatggccgcgcatggcatggaccatgtttgtggaaaacgtgttcctgttcctttggagtctcaccatcgtcggcttcttcatcaagcaatattcctaccgtatggtgccgtacatcgttgcggagaatccgaatatcgaggctttggacgccattcgcttgtcccgacgcatgatgaaagggcataaatgggaatgcttcgtggcggactgctcgttcctcggctggtacctgctcaaccttatcaccttcggcttgagcggcatcttctattccaatggctacaatgccgcgttcttcgcggaatactatgtgtacgtgcgttcgatggccaagactaccggcattgcaggcagtgagatgctcaacgacgaatacctgtacttcaaggccgacccgcagacgctccataccacgtacgccgatgtcgcccaatccgtagcacagctggaacagaatcttgttccagcgcccaagccgcatggattcacaggatttctttctgagtggcttggcatccgcattctgcatgccagcgcagtgaaccgctatgaagagtatcgtgaggatcttcaccagatgcagatcggcgagaatattctgaatggctccatttatccggggcgtcttgcgcctgctccgatgccgttcaaattccgtgaatcacgtaccatcagcgccgaccgcagctactcactggtcaatctgatcatgatgttcttcatcttttgcttcgtcggctgggtgtgggaggtaagtctcgcatttatttccgaagacatgttcgtgaaccgtggcacgctgcatggcccttggctgcccatctatggcaccggcggagtgatcattctggttctgctcaaaaagctgcgcgaaaagccagcgcttgaattcgtcgcggctatggtgctgtgcggctgcttggaatacttctcatcgtggtatctggagatgacgcatgatggtcaacgctggtgggattacaccggatactttctaaatatcaacggccgtatctgcgccgaaggattattgacgttcggccttggcggattgaccatcgtatatctgctggctccgcccctcgacaacctgctcagcagaatcgatgcgcgaaagcttggcatcgtggccgccgtgctgctcgtgctgtattgcgccgaccaagtgtattccgcgcaacatccgaatgtcggtgcgggcatcaccgactacaagggatcggacacgtcgctggaagcgcccactccatacgaaatccgtaaacgatccgatggactgtcatagcgtgattgtcatgcaaatcgcatatcgcaaacaataatgaaatcgcctgtcgttctttcgagcggcaggcgatttcatgctgttgcttattgcgcgattatttgcgacgcagcatttcgtgcagagtttcgatgatcttgctgtatttgatggaatccgtgaaacgcaaacgcgggaatgcgttaatcatacgacgctgctgcttgttcaggatagatgcggcagtggcctgcatattggcaagaatctcctgcgaggagtccgaccaatcctggatcttgtcttgcaccttgtcgcggaatttgtctcggaaaatgtctttgccccattgcagggaatcaccggctttctccgcatatgcctgcacggtttcgctgaacttcgcaagattgtcggccaaatcgatgatgccaagcactgtaataatggtatccgcgacgataaacgccatgaaaatcacgcacatccagtgcactactggcaaaggaatcatctgtgtaatgcgattcacttcaggctgtatcacatcggtgatgagcacacccagcagaccgaacacaatcgctccaagcaagcaaatgcgcccttgaatgttgaatcggcgatgactgtaatcccaccatcgtgcgtggaatagcttttccatgccccatgacgtgacatattcaagcatgcatgcaccgattgaagaaatgagaaaaaccgcgaagagattatgcagatcatgcagcagcacaatcgcaagaacggctccgcaaccgtagatcgggcagatgggaccattcaggaagccacgattcaccaagcgacgttccgaaacggacacgagaatcgattcatatacccatccggcaaatgaatagaacaggaaccataagaacaggtattccagcatgagcatgctttcgcgccgtcactttccacttgtatgcatattgactttcggcttgtagaagcgctcaagactgaccgtttcccgtgtggcgctgatcttatccgcgacagtcaccaaatacccttcaagataccgaggcggtatcggcgtcaaaggaaacatatgattctcgatgctgttacgttccactctattgagatggaaatcgcgcacggcattgcgcatggcggtgccaccatgggtgaaaccatgcatacgatgacggccgccatcatgcgcatgccagtcgtaaagaaaataatcgtgcagcaaagcggcgcgaatcaacgaatgcaaatccaccctatgccataagcgcagcctgtcagcgatccatacggccagacaggccacacggatggaatgagcaaacgtggtgaccacgccatgctggtaacagactctttcgatctgcatatgctcatggcacagtatctcctggccgtgaagtcgaacaagctgctgtatctgcgttcgtgtcagtggcaccgctttgcctttgctatgtactgttgctgtaattatttgagcaatgattccggcgtcttgtatgtcgggccgtcgctgacggagttggcgaaggcacgcagctgttcgatggcggttttcgcggaaacgatctgctcgcgcacgcgcagcggagacgtgcctcccttgccattgcgggcggaaacagaaccttcggtggatagcacttcgcgcacttcgggagccttgtcggccggaaggaattccttgaagacctcgatgaagtcatcgtcggccaggtcccacagttcctggccgcggtcttcggcgatcttcacgcatgcaccggaaagctcgtgcgcgtggcggaacggcacaccgttcttcaccagccattcggcgatgtcggtggcgagggcgaaaccggtcggcgcttccgcttcgaggcgttccttgttgaagaccatggtgccgaccatgccggtgaacgcgggaaggagcacttccagcgtgtcgacctggtcgaacacggcttccttgtcttcctgaagatcacgtgcataagcggtgggcaggcccttcagcgtggtgagaagaccagccagatcgccgatgagacggccggacttgcctcgtgcaagttccgcaatatccgggttcttcttctgcggcatgatggacgagccggtggaataggcgtcgtcaaggcgcacgaacgcgaactcctgggtgttccagatgatgatttcttcagacagtcggctgatgtcgacgcctgccatggctgcgatgaaagcgaattcggcgaccagatcacgactggcggtgccgtcgatggagttcgcggttaccttggagaagccgagttcgcgggccacggccaccggctccaagccgagggtgttgccggcgagggcgccggaaccatacgggcttgcatcgatgcgcttgtcccaatcggcaagacgttccacatcgcgcagcagcggccacacgtgggccatgagctggtgtgcgagcagcaccggctgggcgtgctgcatgtgggtacgccccggcatgacggtgcgtccggccttttcggcctgttcggtcagtgttgtggcaaggccgagcagcattttggcgatgacgcggctgtggcgacggagccacatgcggatcagcgcggcgatctggtcgttgcgggagcggccggcgcggagcttgcctccaagctcgtctccggcgatctgcagcagtccacgttccaatgcggtggcttcgtcctcatcgtcttcgatcggagcgaacgcaccggaatcgacacggcgctgcagctcgtcgagagcgtcttccattcgctgcagctcgtcggcggtcaatagtcccgcacgtccgagcgcacgggcgtgggctcgtgagcctgcgatgtcgtcgtcggcaagacgccaatcgaattgggtggacttgctcagtcgcgcgagttccggagacgggccggacttgaaccggccgccccacagggcgaggtgttcaccattggttgtgctctcggtcattgttacttcattctccttgcagatatgactgagggagaggataccagtcaggatggtcctaacggtacgctctcccccattatcaagacgattcggcgtaaaaaactcgcttactcgacgctgttttccggaacctcgatgccattgccgaacttgacgtcgcgggctgcggccacacggctcggcagaccgtagatgtcgatgaagccgttggacgacttctgatcgaagctgtcgccggaatcgtaggtggccagattgtagtcatacagcgaggtgtcggaacgacgaccggtcacgacggcgcgtccgccatgcaggatcatgcggatttcgccggaaacgtacttctgggtgtcttcgatgaaggcgttcagggactgcgttgccggggagaaccactgcgcatcgtagacgagttcggcccagcgcttgtcgatatcgcgcttgatgcggtgctgctcgcgttcgaggcagcagttctcgagttcctggtgggcggtgatcagtgcgatagcaccaggagcctcgtacagctcacgggacttgatgccgaccagacgatcctcgatcagatcgatacggccgatgccctgtgcgcctgcgcgacggttcatctcttcgatggcctgcagcggggtgacgtcgtgaccgtcgatcttgacaggaatgccctgcttgaattcgatgacgacctcatcttcgactggcgggaatgccggatcgtcggtataggagtagcagtccttggtcgggccattccacggatcctcaaggaagccggtttcaatggcgcggccccacacgttctggtcgatggagaacgggctcttctcggtctgcacgatcggaagcttgtgctccttggcgaatgcgatctcgacgtcgcgggtcagcgacaggtcgcggatcgggctgatggccttcagtgtcggatcaatggaggagatggacacctcgaaacggacctggtcgttgcccttgccggtgcagccatgggagatggtgtcggcaccgaactggtgggcggcgcgcacgagatgcttggagatgagcgggcgggaaatggcggaaaccagcggatacacaccctcatacagggcgttggccttcagcgccttcatgcagtattcattggcgaattcgtcgcgggcgtctaccacatacgcttcaacggcaccgcaggcaagcgcgcgctgcttgatggtttcgaggctttcgccaccctggccgacgtcgagggacacggccacgacatccttgccggtgcgttcctttaggtatgagatggcgacggaggtatccagaccaccggaatatgccaagacgagacgattctgatcgctcatggtttccctttctaacatcaaacgttattcatcagtatatgcaatgctctgtatatttatgcatatacggtgcgtcgtgtccactatacggctattcagcctttggacacgacgtccaacagccattgcgcacgctgtttcgcataatcgtcatcggcgcaaatcaccatgacggtatcgtccccggcaatggtgccgagcactccatcgatgggctgcttgtcgatcacacttgccacatactgggccgcgccagacggcgtgtggaccaccaccagattcctagccgccgcgaccgaagtgaccagtcccgaaagcacacgattcatctgctgttccgtttttgcatcaggattggccgacgcgctttcctccggctgtctgcccagcgcataggccacggttccgtcagccaaacgggttttggtggcatggatctcgtcaagatcgcggctcagggtggcctgggtcacttcgatgccctgatccgcgagaatctgggacagctgcgactgcgaggtgacgatgcgcgtcagcaacgcctgctcgatggcgctcaatcgagcggcccgtgtggcaggacgttgcagcgcaggtgtttggtccgtcatcaggccagcaggctttcatctccgcgggccttgccggcaagccaagtcagcagtgccttctgcgcatgcaggcggttaccggcctcatcccaaaccacggactgtggcccgtcgatgacttcggaggtgacttccttgccacggtatgccggcaggcaatgctggaagatggcgtcttccttggcataagacatgagttcggcgttcacctgataatcccagaacggcttagaacggatggcgtattccgattcttcgcccatggaaacccatgtgtcggtgaacacgcagtcggcgccggcgaccgcttccttcggatcggtggtcaccaacacggaaccgccggtttcggatgcgatggcttcggcatcggcaacgatctgcggatccggcagatagccgttcggccctgcgacacgcacgttcatgccggccacggcgccaccaagcagataggagttcgacatgttgttggccgcgtcgccgaggtaggcgatggtctggtttttcagattgtcgacgccaccacgatgttctgcgatagtctggaagtcggcaagaatctggcaagggtggaattcatcggtcaaggcgttcaccaccggatgggtggaatacttggccatttcctccacacgatcctggccaaaggtgcgccacaccacgccgtaggccatgcggtcaagcacacgtgcggtgtctgccaccggttcgccacggcccagctgggatccggacttgtcgatgaccagcggatagccgcccagttcggcaacgccaatggagaagctggaacgggttcgggtgctcggcttgtcaaagatcaccgcgatgccttgcggtccggcgaacggctgatggtagaaacggtcgttgtggaatttgatggcgagttcgagcacttgcttctgctcttcatggttgagatcgtcatcgcgcaacatgtggcgcagttcaggagttgccattgttggctcctttcaaaatatccagtctgctttgattgccggctatgttcagtcgttgggaagatcagttggaatcttcgcgaggatggagatggcctgatcgatgtcctgttcggtcaccaccagcggaggggcaagacgaagcgcatccggcgccaccgcgttgacgatcaaaccgtgttccaacgcccaattcatcgccgcatgcgcgcatggatgggcaagttcgaccgcgtcaagcaatccacgtccacgcacggagacgaagagcggattgacgcaagccatgatgccgtcacgcaattgctggccacgcgcctcagcgttggccacgagaccgtcttcctcaatggtctccaacgtggccatcgcggcagccgctccgagcggattgcccgcaaaggtggagccgtgggatcctggggtgaacagcgcggaaagcttggcgccgaaggagatcatgccacccatcgggaaaccgcctgcaacgcccttggcgaaggtcacaatatccggaaccactccgcccgcaagatcctcacgctggaatgcgaaccaggatccggtgcgtccgatgcctgtctggacctcatcgatgatgagcaacgcgttgttgtcgtcgcacatctgacgggccttcttcacgtagtcggcgccgagcggacgcacgccggcctcaccttggatcagctccatgatgacggctgcgacaggacctttgccatatttgccgggaccggtttcggcaaacgcgtcatgcaatgcggtctcgtcaccggcttcgacgaattcgatattgggaaccagcggttcgaacgcttctcggatggtgggcttccacgttgcggacaacgcgcccatggtacgtccatggaagccatgggtcatggcgatgatacgcgccggtttgcctccaatggcaggcgatgcgcccggcaaggtgcggccatacagtttggcgagtttcagtgctgcctcgttgccttccgctccggagttgccgaaatacacatgagatccctcgggagcgccggcaagctcaatgagcttcgacgccagttcaatctgcggttccgtggcgaagtagttgctcacatgagcggctttggctgcctgctcactgacggccttcacccatttcgggtgggcgtatccgagcgcgttcaccgcgatgcccgcaaggaaatcgaggtattcattgccatcgatgtcccagatgtgcgcgccttcgccatgatccataacacgcagcggagtaccgaacacgttcatgtgcacccgggagtactcccccagccacttggcgtcctcgctgccgaggttttccaactgttcagttgccatacgaactcctcatttcaataccgtcttcgggaacgaccatggttccaatgccgtctgtggtgaaaatctcattcaggatggaatgcggtttgcgtccgtcgatgatgtgggcgcgtggcacgcctccatcgatggctctgacgcaggcttccatcttggggcgcatgccgctctccagatccggcaacatgtcgcgtaggttctccacgccgatgcgaccaatcagagaatccctgtccggccaatcggcgtacaggccatccacatcggtcagcacgaccagcttgctggctccaagagcggccgcaagcgccgcagccgcggaatcggcattcacattcaacacttcggtagcatcatcctcatttggagccaccgaggaaacaacaggaatgcgtccggcattgatcaggtcctcaaccgcggatgcgtcgacgctcaccacgtcgccgaccaaaccaatatcggttggcgatccatcgatgatcggcttgcgctgcatggcggaaaacagcgcaccatcctcgccggaaagaccgaccgcgaacggaccatgggcgttgatcaacccgacaagttcacgggaaaccttgcccgtcaaaaccatacgcaccacatccatggcctccggcgtggtgaccctcagacctcccttgaattccgacttaatgcccaaagccttaagcatgtgcgagatctgcgggcctccgccatgcaccacaaccggatgcaagccgacctgtcgcagaaacaccatatcttcagcgaaacaggctttgagatgatcgtcgatcatcgcattgccgccatatttgatgacgatgcgctgtccggcgaattcctcaagccatggcagtgcctcaatcagcacttccgccttttggtcggcgcgcaaatcggtatgcacgtcaaaatggaatccaggtcctttgagttccttggtcattaccgttcaatcagctttcgtaatctgcattaatgtgtacgtattcgtgggtcaaatcgtcggtccagacagttgcttccgcatttcccgcatgcaaatctatgtcgatgtgcacctcgcgcggagtcatgtcgacttcggatcggtcgcgtccggctccgccgttctcacagatacgcacgccattgacatcaaccgtgactttattggaatcgtatggcgcgacttccggcggcacggtgcccaacgagctgacgatacgtccccaattcgggtcattgccggaaatggcgcatttcagcaggttggacgcggccaccgcacgaccgcaggcaagcgccgcatcctccgtggtggcgccgatcaccttgacacggatgtcgtggctcgcgccttcgccatcgccgatgatctggcgtgccagagacgccgtagcctgcgcaacgagatcgttgaattcgtccggatcgggttcgatgcccgaagcgccggatgcgagcaggagcaccgtatcgttggtagacatgcatccatccacatcgatgcggttgaacgacatctccactccgacattcaatgccgcctgcaactggccggcgctcaccacggcatccgtagtgatgacgcacagcatggtggccaactgcggggcaatcatgcccgaccccttgaccatacctccgacatggaagccgttggagccttccaactcaacggttttcggcttggtgtcggtggtcatgatggcatgggacgcatccgcaccggcctgagcggtatcggcaagggccgcgaacgctttgtctgcgccagaaagcacatggtcaagaggcagaagctcaccgatcaggcccgtggagcagaccgcgatatcgctgtctttggcacctacaagcgccgcgaccttttgggccgtggccttggactgctcatatcccggctggccggtgcatgcgtttgcgcctccggaattaaggatgacggctttcacatgaccgtcggccacgatcttgcgcgtccactgcacgggagctgcgcagaaacggttcgaagtgaacactccggcagccatatccagcggaccgttattgaccacaagagccagatccttcttaccttcgactgcggaaataccggcttccacgccagccgcggaaaaaccttgcgcaaacgttacgctcatggcgccactccaatctttgtcaggcctgcatcttcaggaagtcccagtgctacgttcaacgactgcaccgcctgtccggccgtgccgcggttgagattgtcaattgccgcgaaggccagcaaacgccccgccttacggtcgatggccacctgaatatgggccgcgttcgatccgatgatattggcggtggccggcatgacgccttccggtaaaacaatcatgaaatcctgatccgcatatgcgtcagtccaaacctgcctgatttcagcatctgacatattcaatgctgtatcggttagtttggcggaaaccgaagcgagaatgccacgggccattggcacaagaatcggggtgaatcccagcgtgaactcgtttgccgcggatgcgttctttcctgcagcatgggcgaagttctgcaaaatctcaggaatatgacgatgagtaccgccgacagaatacggtaatgcggaaccgaatgcctcagctgcaagcaaattgacgcgcttcagattcttccctgcgccggagtagccgaccaccagatcggcaacaatatccgccggttcaacaagcccttgggcaatgcccggctgcagcgctaatgtggttgcggtcacattgcatcctggaccggcaatacgcttggttcctggaatcacctcacgctggtgctggtaagaaccatcttcggatatgccggtaatgagctcaggcatgccgtaagtccagtgctcatagaagtcgccgccgtagaactcatcccatgcggttttttcctcaagcctatggtcggctcccaaatccaccaccacggcattcggatcaagctgggaagccaatgcaccggatgccccatgaggcagcgcaaggatgatcacgtcatgcccgttcagtacctccggagtggtgtcttccaccacaaggtcggcaagctgcggaatatgtggcatatgcttgccaagcttgtccccaacggatgaatgcccagccacgcacgtcacttcgaaatttggatgggccgcgaggatacggagggcctcgcctcccgcataccctgtcgcgccggccacggctactgtgtatttggccatgtcacgtctctttccattgactcactgaaaacacattcagcatacactttatgcactacattgcataattatgcattcatttcgtgtcgcacagtggtcattgcgcgactatgacaattattaaaggactagaaaacacgccgaatcaggcagcgatcgactcgtctccctgccccgatcccgcgccgccaagcatattctgcaacgtctcgttatacaggtcggcaacggaaagaccatgcatcgccaaccaaatcacggccaaagtgtacaacacattgatgatcaccgcggcgagagccaagccataccctttcatatggagcttcttggtacgccacatcgaaatcgcgccgaccaacgcgggaaggaccggcaccggcatcagcacggcaagcacgagagacatgatcgcataggcatcccaatggccgtatgcgggattctgccgaggatcgttgagatccagattcggcagatagggcatattgccctgctgcggatattggttcggatcatacggattcggcccatacgggttggcgcagtatggattccgttgtccgttcgcattgtacggaggcatcggttgctgcccatttgaagggtattgccccgtttggtattgcatattctgctgctgtacagcatccgcaggttgcggttcaggttcaggcgcaccatacacgtatggatcgtaaccggccggcagctggctactcatcgcaccatattcgggttgattgatctgaccatactccggctgtgaagacgcagcggcatcggaagatgacgaaaccggagcagcatcagccgtctcctgacgttcgtcggtgttggtcggctgatactgctccggttcgttcataatcatcctctgttcttgggaaggtcgggatcaggcgcgcagctgcgcacccagcttggacgcttcatccacaatacgcttgcggatggcttcgctgtcttcggaagcgagagtcttatccggagcgcggaatgtgaccgcgtaggccaaagacttttcgtcctcgcccagctggtcgccggtgtacacgtcgaacagctcgatgctttcgaggctgcttccagcggcatcgacaataacctgcttgagctcggcggccgtaacatcagtagacaccgtgaaggccagatcctgcttgaccggcgggaaggtggaaatcggcttggcctgcaccggcttgccgctcaacgtggcgaacagcgcggtcaaatccaactcgaaggccgcggaatgggccgggaagcccaacgcctcgttgacatgcgggtgaagctcgccgaccataccgacgaatacgtcaccagccatcacacgagccgcacgacccggatgccattgtgccggcacatcttcagccttcggctgatccagcgcgagagctgcaccaatacggtcggagatgcgctgcaccgcctcgacggcgtcagaccaatccactgcgcggcgctcgcccagccaaccggagtcaacggcgttgccggtcagaatgccagcaacatgcatcggctggtccggaagaccggcatcaagcgcggcaagctgctcgtccgtcggcttgactgcacccggcagtgccggaatcgccggagcgttcggatcccacagatacacgtggccgatctcatacagcgacacattctccacgccgcgacgcagattgcgctgaacggtctgtgccaacgtcggaataatgtcacgacgcaggaacggacgatcaccggcgagcgggttggcgatctccacgctgacgttcttcgtctcagcaacgtccagcgcgaagtccttgtaatcctcatcgccgacgaacggatagctcaacgtttccaccatgccgtattcggcaagttcatcggcaacctggcgcttgcgcagctgctcagcagtcagaccgacctggccttcgaccggtgccggcggcacggtgacgggaatctcgtcatatccgacaagacgcgccacttcctcaaccagatcgcacggctcgttcaagtcggggcgccaacttggaggtgccacggaaaactcgccgttgccgcctcctgcgacggagcaaccgatgtcggtaagaatgtcgctgatggtgttcacgtccgtgtcaagtccggccacacgagccacttccgaagccttgaacaggatcggacggcggttagagacggtattgaagtcggtcggttgctcgctcggctcgccattgccgtacttaaccatcagttcggcggccatttgggcggctgccggctgcagctggtcgtccacaccgcgttcgaaacgacgggaggcttcagacggaatcttatgacggcgtgcggaacgcgcgatcgacacctgatcgaagtgcgcggattccagcaggatgttcttggtttcggcagtgacctcgccatacatgccgcccatcacgcctgcgatgccaagcacacgggagccgcgttcgccattcggggaatcggtgatcagcagatcctcgacgctcaaatcgtgatccttgccatccaacgtggtgagcttctcaccttcgttggcgcgacgcaccacgatcggtccttcgatcttatccagatcgtaggcatgcatcggctgtcccaagtcgagcatcacgtagttggtgacatccactgccaaggagatggaacgcatgcctgcgcgggtcaggcggcgacgcatccaattcggcgtatggctggccggatcgaagcccttgaccgcgcgagcgtaatagcgatcgcatccaaccacaccgtgaatcggattattgtcgtcgacgatcacttcgatgtcggtcttggtgccttccggcaggcccttggtgatcggtgccttctcgttcagggcgacagccggatcggtgtaggccgcaccggtggaatgatggtattcgcgagacacgccacggtatgagaacgcgtagccgcgatccggagtgatgttgatctccagcagcggctcgtccaagtgcagcaggtgcatggcgtcgtcgcccggctggagcttctcatactcttccggggtgaagccgtacttgcgaagcaggatgatgccgtcatggctatcacccaatccaagctcacgttcggaagcgcacatgccgttggagatatggccgtaggtcttgcgcggttcgatcttgaaatcgcccggcagcacagcgccaggaagcgttacgacgaccttttcgccggcagccatgttcggcgcgccgcagatgatgccgcgcggcaccttgttgccgttctcatcggtctcgttgtattcgtcgccgacgtcaacgtggcaccagttgatgatcttgccgttcttctgcggttccggagtggcgtcgaccacgtagccgacgacgatcggaccgaccagctgggaggtgtggatctcttcctcttcgagaccgaccttcaccagatctttggcaagctgttcgtacgtaaggccttccggaacctcgacatggtccttgagccaatcaatgtcaaccattggcatgggtcaatcactcccccatcacaaactgttcgctgaatcgcacgtcgccttcgaccaggtcgtgcatgtcgttgatgtcgtggcgcagcagcaaggtacgttccacgcccacgccgaaggcgaagccggtgtagacctcaggatcgaggccagcggacttcagcacattcgggttgaccataccgcagccgccccattcgagccagcctgcgccgcccttcttgtcagggaaccacaggtcgagttcggcgctcggctcggtgaacgggaagtagctcggacgcagacgggtcttggcttccgggccgaacatggccacggcaagcttatcgagcacgcccttcaggtcggccatggtcagatgcttgtcgaccgcaagagcctccacctggtggaacaccggcgtatgggtggcgtcgagctcatcggtgcggaacacgcggcccgggcatgcgatgtacagcggcacgccacgggtgagcagaccacgcacctgatcggaggaggtctgggtgcgcagcaccatgttggatccgacgaatcctgcggcgtccttggcctgattgcccttgacgtagaaggtatcctgcatctggcgtgccggatgatcggggccgaagttcagcgcgtcaaagtcgtaccattcggtttccacttcaggaccgtcggaaatctgccagcccatggaaatgaagaagtcttcgacatcctccatcagtttcggcaacggatggcgcgcgccaagcggcttgcgattgaccggaagagtcatgtccacggtttcggcggcaagcgcacgggcctcttcctcggccttgacctgctgttccttggtgccatacgcacgaccgaagtcagcgcgcagcttgcccatgatcttgccggcgtctttcttctggtccttcggcagcgcgccgatggccttgctggcctgcgtcatcgcggattccgctccggcgtactgcgtcttgatggctttcaattcctccatgctggaggcgttttcgattttcgcgatgccctcggcaaccgcatcggttaccgcttgggcgtcgaataccgcaccttctgccacgagatacctttctcatttcccgtttgttttacgcgaaaaacgcgcaatttcaacgttttccgactttacattctttcaacatgactcgacatagccaagctcagcagcattaccgccgaactggtgccgaggttcaaggattccgctttgccatagagcggtatggacacgatcctatcggttcgttccaaaacttccttggtcaatccacgcgcctcattgccaaacaacaccgctttggctccggcaagcgtttccggcgcggcgattacatccgtcagggattccggctgtcgggaatccgtgccatatacatcggccgcatacactgccagctcgtgagtatcgcaccatgcaaagaagtcgtccgttcccatggccagaagcggaaggtggaacagtgatcccgcagtggagcggatcactttcggattgaacacgtccacgcagtcgtcgaccaataccacggcggagcagccggccgcatcggcggaacgaatcacggttccagcgttaccgggatcgcggacctgccaaaacgcggcgaccatcgcatgtccgtcgaaatcgtctggaacagcggacgaatcaaggaaagcctgcatgtccgcgacggcaagcacgccttgcgcgtcggcgctcatacggtgcatcaccgcatgagtgaccttgtgcacatacacgccggattgcatggccttgcccgccatctgtgcgacggcaggtgtcgcaaacgaggcatcgggctgtgccgactcgacctcaacgtagaggtcctcgacaagtcctggatgccatgtcagcagctcgcgcaccgattgcgggccttccaccatgaaacggccggaccgttcccgcccttttcgatcggcaagttcggacacgcggtggacgcgctccgacttggtgttcgcaatgacttcggattttataggcatacgcgttagcctaacaccattgccgcaacgaatgccccattcatgtcgtgtttttgattcagaaaagtggagaatcgcgaatccaacctggtacgctcaacaacctgtcgaagttcgcgttgacgctgctcattgtggtgctggtggtcatcacattgctgaacgtacgtgaacgtaagtatgagatcggcgtacttaccgagatcggtgcggacaaagtcaaggttgcggcgcagttcggtcgagatatgcagggtgtcgttggacgcttcgctccccttatttcgccccgtattcggcatgtcatgaatttggcaggccgagtatggggcttttgcacatccatgaaagatatgcacagcttgcgagtgtgtctcaccgctttcgattggtttgcgaacatcggttcgttacactgattatctgacttattgtctgattacggttgagcgcgcgacatcatcccatgaatgttggaggtacaagcatgaacgtcacggtgtatttaggagctcacgaaggcgacaaccccgtatataagcaagccgtggtggaactggccacatggatcgcccaaaacgggcaccgcttggtatatggcggttccgacgaaggactgatggcggtgattgccgacaccgtgcttgagcagggtggcgaggtgaccggcatcgaggcgcagatgttcgtggacaagggtgtcgcgcacaagaatctgacccagctcaccatcgtgccgaatatcaccgaacggcgtactcgcatgatcgagcttggcgacgtgttcatcgccttccccggcggcacgggaacgttggaggagatcagtgaggttgtgtcgaaggtttgccttgaccagttgacgcagccttgcattttctacaatctcaacggtttctacgatgacatgaaggcgttgctgcagcgcatgatcgacgatggcttctccacaggggaacgccagcatggtatctatttcgcttcggatcttgccgagatagagcatattatcgccatgcacaaggcataggcggctcagtaaggtcgtttttattcgacaggtttttcaagaaaacggggacgcccaaacgaccctcataatcggccggaatatcctccaaccggcccatcacaaccaacatgcatccacatgccccgcagcgcatccggtcaactccgggatgcttcgtttgccgaacttactgatcggatggaacccgtatccgtcggccacgcgaagaatggatttgcgttttattgtctgcatgatttacagtttcgttaccatgaacatcccgtttgtcctgctgtacattttcctcggcggcgtgctcctgttctccgcctattcgctctgggagaaagacaaaaacaatcggaggtaatgcagaatggacagcaaggcacttctttccttgaaccatttaagcgtctggtacaccgcagatcaccccttactttctgatttgcactggatctaggggcagcggaagatcagtcatttcagtatttcacattccgggaatatctaacgtatgtggcggcgtcctatggtgtcccgctgccagatgtgtctgacctcataaggggatttcactttgaggactatgccaatgttcttctatcggtcgcggatcttcttccactgcctgccatagcgcttgcccgcggagtagccgcgcgtgaaatgcttgtactgccgctccgcttccttgcgatgcttctcacagtattgctcgccgtcctcgcaaaggttcgggcagccggggtggcggcaggggcgtcttggttttctcggcatgcgtgccgcctcctttcggacaatagaaaagccccgaaaggattgctcctttagaggcttgaaataggtcgtccggaccgcgttctccttctttcggcttgttatctacgatgggcgccatgggtgcttatagagagtggttcgcggtaacgctacgcttgcaagacggttgaaacctgagtatttatttaatccagttaggcgtagtgctttgtgatgcacattggcaataaaaatcttgaaagacgataagcggctatgcgggaattactacatgaggatgatttcctacgatataccctgcagagcaaaggcaaggtatatttgtgggaaacgagtaatcaatatgcatgaacggcgcatgtcaccaaggagatggtttcgacatggacaaggatttccttgcgatttttaatgccataaaggctgatggggcgaatgcagactacaccaagcgcggcatcgatccgctctactccgtcggggctggcgctcgcatcgtggtcatcgggcaggcaccaggcgcggtggcggaagagacgcgcatcccctggaacgacaagtcaggagagcgtctgcgcgattggctgggtgtttctcgcgagacgttttatgatcctgagcgggtggcgcttctccccatggacttttattttccgggacatggcaggtcgggcgatctaccgccgcgcaagggattcgccgagcagtggcatcctgcactcttggcgctcatgcccaatgttcggctcactgtgcttgtgggcgcatatgccgtccgcaggtacctgcatctcaagaattcggacagccttacaaccgtggtgcgcgattatgatgcctatatcggccggggattcttccctttggtgcatccgtcgccgcgcaaccagctatggatgagcaggaatccttggttcgaggccgagaccttgcctgcactcaaggcacgggtcaacgcggcgcttgaacagaggtaagtggttacgaaatcatctgtgacgataacttccagccatacaaggaggttcattcatgcagagaaggacgttggggactcgtgaggcgcttgaaggcatcctcgaagatgccgcgacgctaacgagagcgttcgcgagtgactatggttatgacctcgtcagtcttctgctgcccggtgatgaatgctcgtatgtgatgggcaacccgccgttcatcggccatcagcagcacacgcagcagatcaaggatgatatggaactggtgtgcggcaaggccggaggctcgctggattatgtggctggatggtattttaaagctattgatttccttgacgggaatccctccgcgcaattcgcgttcgtatccacgaatagcatcacacaaggccagcacaagtcgccccgctattcaagcatgtggtcgaacgagggtggcgtatccggttcgctcaccgtacgttctgctgggacgctcagactacggacaatgcgaacgtgcatatcgtcattgtcggattcgacagaggcacaaacgctcctgcgttgtatgaatacgacgacattaacggtgaacctgtggaagcacgtccggctcatatcaacggttatttattggatgcgtctgatgtgttcgtggaggcgaggagtcagaagaccggtccgtaaggtctttgccgtcccggatggaagaaattctgtaggaataaggagagcctccccaatttggagaggctctccttatagccaatctggctaccttctgattacccttggagtccaaaacagcttgatttcaagggaaactgggtataggcctcagatgtggaagccgaggataccgtcttccgcttgacgcgccgaaactgcgtaatatagccgcaaaagcgttgcgggacaacgcttttgcggtctttcgcggcaattatcagccgccctttttcgtgacatgcgatgacatggacctgccaactaggtgcagtattaggtgcagcgcgtgcgcgcatagccacggggcatgaaccggaagacgaacatgccgcgatacacgctgacgctcatcgactccaccaaccagaccccgccgattgtgctcaccgccgaatccaccagaaccatcatacgccagctgacgaaacggctggaccccacgcccgaacgcaggcgcgtgcagggctccggaggatttaccatggagcgcggatgcgtcaaggcgttccgcgagctcccgcccgaccccgcgaccgggaaccgccggcgcgccaccgcgttcggcgccaccagggccgaggcggagcgcaggctcaacgaaaagatagccgagctccagcgcgtcggacggctcggctacacgaagccgcccaccgtggccgaatggtgcgaccactggctgaacgacatctgcaaaccccacctcaaaccccgcacctggggcacgtacgcgtccgtcatcgaacgcaacgtcaagcccgccatcggcgccgtcaggctcgacgagctcaagcccgcgcacttccgccgcatggaacgctacgtcatggaggagcagggcaaaagctccggcaccgcgggcagcgcgtggcgcaccctgcacaaggctctggaggacgccgtattggagggcgtcatcgaacgcaaccccgccgtcaagggcaccgcgccccgcgtggcgttgaaggaacgcgccgccctgacgcccgaacaggccgccgacctcatcgccgcggagaccgacgacacctggcggctcatgtggatgctggccttcatgaccggcatgcgccagggcgaacggctgggcctgaccgaagacgaactcaggcgcgacggcgaccggctcatcatcctggtcgaatggcaggcccagcacctgacgaaacgcgaggttgagggactgcccaagggcgtcgaatgcacgccgctcggcaacggcatgtaccgcacgcgccccaagaccgagaagggccgccgcgccataccattgcccgaggccctcgccgaccagctgctcgcctacatcgaacgccacggcgtgaacggcgacgggctcgtgtttcacgacgacgagggactgcccctgacgggcagcgtggagcgcaggcgctggtaccgggccctggaccgcgtcggcctgggccacgagtacgtaccccactccgcccgccacaccaccgcgaccatcctgaaccggctcggactggacgacgtgacccgcaccgccatcatgggccacagcagggtcagcacgacgaacgagatctacacgcacgtcgagctcgaccggctcgtcgccgcgaccgacggcgtggagagggcaatcgaaggctaggcgggcatgaccgtcccccgttcgacgaacgcggccacgtcggcggccctgtagcggatgtgccgccccacgcgcacgtatggcaggcatttgcgtttcgcccgccacttgcgcaacgtctccgtggatacgcccagcaggcgggcgacctgctgggccgtcatcagttccggtacctccatgccgacgcccatgcgtcccgaagcggtattgagcggtaacgaccacaccgagggtgcgtttccgggcatggcgggagtcaaggtggaaaccacggcggaagggaggagcctcaatgccctatatcgacatccacagcgaacgcgtctggataccatgccatccgctccgctccatggaaaaggcccgtgcggcagtggtaaacgctggggcttctatgagccgacccgcgatgatggggcgcgaccgtgattggatgcgtgcggggcggggaatcctccctcgccgcgaagccgggcaagcaccagctccgcggcgagcagcctgcgcgcattggaacgtggcgggcccgaacttcatcgccgtgcacgagatgctcgacccgcaggtcgacgaagtgctcgcgatggccgacgagacggcggaacgcatcgccgcgctcggtggttcgccgtccggacgccccgacgacatcgtgcgcttccgcacatgggacaagttcgaccttgacggacgccagaacacgctcgactatctgcgcgcgctcggacaaatactacgatgcgttcatcaaggacgaccgcaccgcgatcaaggagctcgacgaccttgacgtcatcagctcgaacatcatccaggaccacgtgcagaagcttgagcagttccagtggttcatgcgttcgcatctgatcgactgaccgttgcatcatcactatgacgtatctgcctatctttgggtgtcccaaacacccaaagataggcagatgccttgagtactactcccggaagccctgcttcggcgagaatccggcgtagttgcgcgccacttcgattacgcggtacacgtcgagctggggctgcacgtctatttcgccgcgccgtatgtaatcaaggaaccggctccacgccgacttcgcgcgtgcgtcgtcaccatcggcgatcgccgcgagcgccgtgctgatgcgctcgacgtagccgcagtgccaatccagcaccagccaggccgcgcgatgcccatcgtccgcgccggccacatgatccgcgagcatgtccgcgacggcgcgcgcctgctccgacagttccgcgtaccgcttcgcctgttcgggattgtgccgttcgccgatcgcgttgaagtagtcgcaggaggacagttcggaggccatctcgagccacggcagcgcatcgcgccatccatcgccgagcagcgcctcgaaatattcgtccttgagctgcccatagtcgagccgtggattccacagcatccgccccatcacatagttcggcaggtaatgcgggaagcccgcgcgcagctcctggcaggagatgtagccgttgaggccaagatccctgagcttcgcgatatcgcggcggatcgtgtcgctgatggcgaggtatccgaagtcgccgtagtgcgcgcgtccaagcggatagtcgtagacgaaggcatcgccctggaacatcttccgccatgcgaacaggtacgcgaggttgtcctcgagcgagttcggcagcacgatccggttgcgcgtgtacggcgccggctgcggcagatcgtcgaggtccacgtcggcgtagctgcgttcgaaggtgcgcgtgatcggcgcgaacatcatcgtgaatcgctcggggtgcctgatcgtctcgtgttcgggggcgaacagcagctcatggtagagcaggaagcagatgtgcacatccagcccttcctcggtgaggcgttcgtcgagcgcgttgaggaagcgcacgtactggtccgcaggcagccatttgcggcattcgtcgcattcgcagatgttgttccgggcgtcggagagccatacgtgcaggtagtcgacgtccgggtgcttgcgcgcatagtcgacgacgagctcgaccatgcgcggcgtcacttcggggttcgagaaatcgaggctcgtcaggatcggcgctccgtcgacgagctctcgtctgccgtcgagttcggcgacgagcggtttcttctcctcgggtatcgtcagtccggattcccatccgtacttcgacgaatagccgagcacttcgccggtccacccgtgtcccacacggtgctgcacgatgccgcgtgcgcgcatcgcctcgtcgacgcggtcgctcatctgctgcgcgatgtccgcgtcgaagggctctgcgttgatgtacggattgaattcgtgctgataccagcgcttgaggaacgggtacggattctcgaactgcacgaagaacgtgttgaagccgagcttgggcagccaatcgatgaaatcgatgatgttcccgacgctgtcggcgccttcgatgcagacgccgcgatgcgcgaaggcggcggtctcatggatgtcaaggtcggcgtcgtcgaagaccgcacggtcgagcttcggcagccgttcgccggcggcgcccggctgcgggaagcgcgccccgaattcgtaggcgaagcggtacacggcgatcagcagcgcgacgtcggtgttcgcgtcgatcgtgagcctgccgccggagagcgcgatgtggaactcgtccttgagctcggcgtcctgtttcagccccgccgatgtgaggacgagctgtgcgccgatgtcctcggacgcttcgcggacgtcgatgccgaacatccggtccatcagccgtgtcagttcctcggtgatgaatgtcgaggcgtatgcgcctgcgtcgatgtgtaccaacatgatgatcgatgctccttgtgtggtttccatattcattgacgatgcgttgtgcgcttggacggttccgccggggatggcgaggcgtcctgcggcgccgcggcgccttcggccttgtcacggtgttcgtggcgttcctcggagtgttcggccacttccttgagttcggcgacctcgtccgcggcttcgctggcctgcacacccgccgcctcggccttgacatgggccgcgtcggccgccttgaagaacgggaggtagatcaggaaggagatcacgacgagcacggcctgcagcacggcgccctgccagctgccggtggcgaggaaaccgccgatgatcgggggcgtcgtccacggcagcgccacgccggtggtgtaggggacgaggccagtggccatgctgaggtaggtgacgacggcgttgacgatcggcgtgagcacgaagggcacgaacatgatcgggttgaggacggtcgggaagacgaacaggattggcgtgttgatgttgaacagcgccgggatgccggagacgcgaccgagcgtcttgtattcacggctgcgcgacaggaacatcaggcacagcgccaggccgatcgtcgcgccgccgccgccgatgtagacgaagaggtccatgaacggcgcggtgatgatgttcggcagatcctgcccggcctgcagcgccagacggttcgcgtccgcctgctgcagccagatcgggttcatgaccgagccgaccacctggccgccgttgacgccgcagaaccagaacaccgagttgagcagcacggcgacaaaggtgccgccgagcgtgccgccgatcaggccgagcggcgtgccgatgatgagcgcgagcaggttgttgaggctgccgacgccggtgacctggaggaccttcatgacggcggcgaacaggatgatgatgacggcgccggggatcagggctgcgaaggagcgtccgaccgcgtccggcacgcccttcggcatcttgatcgtgaagtcgcgctggatgaactggcggtagatctccgccgtgatcatcgcgacgacgatcgccgtgaacaggcctttgccgcccatcaggccgtaggggatgccgaagccgtcatcggtcttgagcggtggcgtgacgagcaggaacgcgccgatcgcgatgatgcccgccgacggtccgtcggtgtcataggatttcgcgaggctgtacgcgatgccgaaggccgtcgccagtgagatcaggccgaaggtgttgttcgccatcgtattgagcagcacgtcgagctcgccgtgcttgttgagccatgtggtccacgcctcgatcggaaagcttccgatcaacgtgaagatcgagcctaccagtaccaatggcatcgccatcagcacgccttcgcgcagcgccttcagatgccgctgcgccgccactttctcgccgaatggggcgattttattggccaggaagtccattaatgccgtccgtgccaccatatcctcctcatgaatgcgttcgtcgtcgaacttatttagtaaggtttgcttacttattatgaagcagcagttcaagtatcgcacactatcgttgcgttcactgcactaatcaacatattcattggaataagtaggttttaacggcgtgtcccattcattacacaccgtcgcaaacgccaaaaacttatgataaactggtgaaggaatacgtacgataaccaaacttatagatggtcgtcgtttcccctgtcaacgccgacggaggacaagacgcgaggaggtaccatggcacatcgtttccgtcacgcgctcgccctcgcgctcagcgtcgccacggtgctggcgacggccgcctgctcgatcggggcgcccgtcacccgcgcggcgcgcaccgacgaaatcaccgtctgggtcatgcaggacgacttctccgctgcgacgatcgacgccatcaacacacgattccgcgcgcagaccggcgccgaggtccatgtgcagacgcagccgtgggacggcatcgcgacgaagctgatgaccgcgttggccacgtcgaacccgccggacgtcatcgacatcggcaataccaaagtgctcgaattcgccaggacgggcgcgctgctcgatttgtccgcgcaacgtgaggaactcgcgcatggcggcacatggctcgacggcctcgaacaaccgatgacctatgacggcggcctgtatgcggcgccggccttcggcgccgcgcgcacggtcatctacaaccggcgcatgtggcgcgaggccggcatcaccacgcctcccaccacctatgacgagctgtgcggcgacctcgaccgcgtccaacgcgcgcatgccggcgacgccgacttcagcgcgctgtatctgccggggcagaactggttcgccggcttgcagttcctctgggacgccggcgcctcgcccgccgagctgcgcgacggacagtggaccgcgacgcttggctcacccaacggcatcgccgggctccaggcgtgggcctccttccagaaccgttactcgtcgaaggcgtcccgcaccgcggacacgttgatccccgaccaggcgcagctgctgggccagcagaagacgtcggcgatcatctggaacgcctcggccgttacgaaggccgtcgcctccaacccgcagctgtccgcggacgatttcggcgcgttcccgatgccgagcgtcagcggcgacgggcagcagccgaccatgatgtccggatcaggatgggccgtggccacacgcagcgcggccccatcgctcgcgctggcgtggatctcgatcgccacatcccccgccgtcgaacgcgcatggatcgtcgagcatgacggctggttgccgaatacgcgcgagctcacagccgaatacctggcctcgggcaagctcagcgccgtgcagcgcggattcttcgaggccgcgatgcattcgcgctccacaccgaacgccccaggttgggcgacgatcgaggcggacggctcactcaaggaactgttctcgaaggccgcgctcgacccttcgaaggcgcaggacatcgccgacgctttcgacgaacgcacggacgccgtcctctccgaagcgcaggaggaactgtgataacccatcgacccaacaccgcgcgcacgatgatgcttgcgccggccgcgatcacactgaccgtgctcgtaggcctgccgctcatcatgctcatcgtcgcgtcgttcaccgatttcaacgcgcgttcgctgttcaccggcactttcgaaccggtcggattccggcagtacgccgcattgttctcgagcggcccgttctaccatgcgctcggcatcacaatcctgttcaccgcatcgctcgtcgtgggcagcatgctcatcggcatgggcgccgcacagctgatgacgaaactcggcccggttccgcgcaccgcgatgatggtcaccttggtcatggcgtgggcgctgccaaacgtcgcatcgtcgctgatcttccgctggatgttccagccgggctacggcatcgccggcaccacgctcagtgcgctcggcctcttcggcgatgtgcgcgacaccgcatggctcgcgagcgcacccaccgccttcgtcgtcatctggctgctcgtcgtctggcaggcggtcccctacatcgcgatcaccacctacgccgcgcaaagccagctcgacccgtccttcgcggaggccgcggcgctcgacggcgcgggacggctgcgcacctattggcaggtgacggtgccgttgctcgcgccgcatctcggcacgatctgcatcctgtcgtgcatctgggacttcaacatcttcaaccagatctggctgctcacgcagggcggcccggattcgcagaccgcgacgatcggcgtctacacctaccggcaggccttcgtcggcttccgcatcggcgaggggtcggcgatctcggtcgtcacgatggtcatcctgttcgtactcacgttggcgtatctgaggcgtctcgcctcggagcacgaccgctaaggagcgcatcatgcacgtcgcaaccccgcacaccgcacgccgacgctggctgccgccgctgctcgccatcgtgttcatcatcatctggatcttccccgtctactggatgttcgtcaccgccaccggcacacgtgagacgcagttctcgccacgtccggcgctgataccgaagtctctgtcatggcgcaacttccacacggcgctcgtctcggattccttcggcatctatctgcgcaacagcctcatcgtcaccgtcacagcggtgctcatcgcgatcgtcttggcgttcctcgcgtgcgcggcgctcacactcagccaattccgcgcgaaaggcgcgatgatgggcgtcgtcatgatgctgcagatgatccccggcatagcgatcctgataccgcagttcatcgtgttcaaccgcttcggcctgctcgacacctacactggcctcatcctcgcctatgtcgcctcggtactgccggtcgcgatctggaacatgcatggcttcttcctggcgatgccgcccgcgctcttcgaatccgcgcgcgtcgacggcgccaacgaatggcagatcctgatgcatatcaccttcccgatcgcgctgcccggcgtcatatcgacatcggtgctcgcgttcatccattcatggaacgactacctgatcgcctacaccttcatgaaggaccccggcaaatacacactgccggtatggctcgcctcgttcgccacccccaccggcatcgacgcgggtgcacagatggcggcctcgctgctgttctcgctgccggtcatcgtcttcttcatgctggtgcagcggggactgatgaagggatcggtcgaaggatcggtgaaataggcatgcaatacactcaaccaacatcaccaacgggacagaaggggaacccatcatgacgacatcaacgaaccacagcgcgcgggggaagcagccgagcgcggacagtgtggaccggatcgactgcagactgtacgaaccgccacggcacacgggctacgaaagcgtgcggtcgttctcccccgaggacatccgcaaacgcaaccgccgcagcgcactgcggctgctctatccgcggcggctgctgtcccgggccgatatcgcgaaactcagcggcatctccaaatcgtcggcttcggacatcgtctccgcgctgctcgaggacggattgatccgcgaggaatgcgtcaagcagaagcacgggcccggcaagcccgcggtcgccttccaattggccgcggacgcacggcagatcatcatcgtcgacctatccaatgagcacaaactcgtcggcgcgctcacgaacctcgtcggtgacatccagcagcgcatcgagctccacgtggaacagatcaccaccgacgacgtgctggcattggtcggacggctgcgcgacacggctgacgcgccgctgctcggcatcggcctctcctcccccggcatcgtcgacggccaaggcaccgtccacgccgcaccgaacctcggatggcacaatgtaccgcttggcgacatggtcgaggacctgtacggcatcccgacgcgcgtggacaacaacgcgaacgtggcggcgctcggcgaatggcagttcgtcgacccgacgagcaacctcgcctacattcgcctcgcgcgcggcgtaggcgccggcacgatcgtcaacggctgcatcgtcgaggggagccggttcgcggccggggagatcggacacgtcgtcgtggacggacaagggacgatgtgccggtgcggcaagcgcggatgcctcgagacgctcacgtcggtcgagcggctgcgcgcgcgcatcgaagcggacccttcgcagcgcgagcgcatcatcacacaggcgggcgcgtcgctcggacacgtgctgtcgctgatgatcgcgatgaacgacatcgacgacgtcgtcatcgacggggaccacgaaatcatcgacgatctgttcctgcaaagcgcgcagttctcgatcaacgaacacatcaacgaggagctgttcggcaggatctcggtacgctatccgcggctgggcaaccggtcgtcgatcttcggggaatgcatggccgccgtcggggaccacctgcgatgaccgcaggaccaccaccggggacccggggacggcgaggacctcagcgatatgtaaagcaaacttgacagtaccgtgtacttgacatgtgatcggctcatccatctgcacaccgacccggatacggaggaggagccatgcatcagaagacgacacagcgacagcaccggttcggacgcatcaaaccggacggggtgccggcgctgcgcctcgcggcacccatcggggtggcggccgcggccggcatcggcgccgcactatggttcgcgttcccgcagatgcacggtggcacgaatgcgtggatcggcattgccgtcgccggcgcttgcttcgctccggtcatggtggccctcgcctaggtgctgctcgtcgaccgctcgacgatcccgggcgccatcgcacaccccgaacacagcgtggaaaacagctggtacgaccaggccgcgaaggacggcttccatctgctcctcgtaggcacgggcttcggcgccgcgattgcgggattctgtttgccgccgatggtgtcatggacgcttgccgccgtgttcgccttcgccgccgcggcgttcggcacgaactacctgatccgcaaggccggcgggcgatgaggaaccggctgccggagctgcggcgcgaacggcggtggtcacaggaaacgctcgcctcgatgctcggcgtgagccgccagacgatcatctcgatcgaaaagggccgtttcgacccgtcattgccgctcgcgttccagatcgccggcgttttcgacctgaccattgaggacatcttcacgccggacgcggcgtaggcggcgccgttgtcggctcctatccggccatctttgggtgcgcccagaagccactcggagggattcccgcgcgaaaaggcctccatcttgtgatctttgggtgttcgaggtgcccaaagataccgagatgggacgcgtttggggccggatggcgtgtgaggcacccgaagaggcacccaaagatgacgagataggtccacacaggagcgcggacaccactggcgcatcgcacgattcaccgcgtacactggaaacgaccgggcgagttctagtggtcgtcgcaacactttgaggaatcggaggttgcggcgatgggctacgagttcgagggggtcgtgcacgaacggctgcgtgacatgcaggccgcaaggcgagcccgctatgcggagctgctgaaggcgggcatgaacttcacgcaggccgcgcacgcggtcggcgtctccaagcgcacgggcaaggtgtggcgcaacgggctcacccgttcgaccgggcgtaacgaggggccactggttgattggtacgctggccgcatgggaccagaacgagacaggcaggcgggcacgcggcgccatctgagcgaggacgagcgcatcgagatcgccgacctggtgcaggccggcgagggcgtgcgcgccatcgcacgcaggctggggcgaagcccctcgaccatcagccgcgagcttcggcgaaacgcccacccgcatgacagcgtctaccggccccggcgcgcccaccagatcgcccggtcgagaaggccgcggcccaaggaacgcaagatccgacccggcaccgcgctctacgactacgtggccgcagggctcagacgccactggagccccgagcagatcagccggcgcatgctcctcgacttccctgataatgaggccatgagagcatgtcacgaaaccatctaccaagccatctacgtgcaaggcaggggcgaactgcgcaaggacctcgccaaggcgctacgcaagggacgcgcggccagacggcccagaaacgacggtcagtgccgccggccgcgcttccgcgagccgatggtcatgatcagcgaacggcccgccgacgtcgccgaccgggcggtccccgggccattgggagggcgacctgatctgcgggaccgccaacaggagcgccatcggcacgctcgtggaacgcgcaacccgctacacgatcctgctcgccctgcccgacggccacgacgccgaacacgtgcagcaggccatcatcgacaagatgggacggctgccaaggccgttgctcaactcgctgacctgggaccagggcgccgagctcgccctgcaccgcaggatcaccgccgcactggacatgcaggtctacttctgcgacccgcgcagcccatggcagcgcggcaccaatgagaacaccaacggcctgctgcgccaatacttccccaagggcacagacctttccggatacagccaggactacctcgacgccgtcgacgacgaactcaacgacaggccgagaaaaaccctcgactgggccaaacccgccgaaagaatcatcgagctgttcaacaccatgcaatacgctcaataaagcaaacaatcacaacgacatgttgcaacaaccactagaatccgcccatcggtccggcattccccgccattatcgcagttctgtgtgctgtgccatccgaatttcgtttcgtcccaatcggacggacccgcctgccattgccgtcttcctgaatagttatcgccggtggtgggtatcactgccgcccatccccagctgttaccggtgatgtcgctgtgatattcgaagtccccgttgacgatgtggtcgggcagttgcgcggcatcggccgccgtatcgtccgccgacgcgaacggcgcgacgaacgcggccagcaggcatgccagcacggccagcatggccgacgccttttccatgaatcgtgattgtgatgttcccataccatgtggctatgcgtcgcgcggggacgcatagcggtcggtatgacatattcgaagaagccaatcgccgacccggagaccgatccggagccggacgacgccaagaagaagccctacgtccccatcaccgaccgccccctgctgggcgtgccggaggccgaggcccttaccggggtgccggccaagatcatccgcgcccaggtacgcaacggcctgctgaaggcgcgcatggcgggcagcacgaccatgcgcatccgccgcgccgacctggacgcctggctcgacgcgctgcccgcctggcacgtataaggaaaccccacttgcgtccgattgtggacgaagtggggttcttcagaacaccataggtgcagcataggtgcagtgggctattctggataccgcgaaagccctactgccggctatgttccgccctatgcggccgtcagatgtggaagtacagctcgtactccagcggggtcggagccaggcgggcctggtcaatttcgccacgcttgatgccgatccaggtttcgatcaggtcgtcggtgaagacgtcgcctgcggtgaggaagtcatgatcttcctcaagggcatccatggcctctgccagggagctcggaacctgcttgatgcctgcgtgctcttccggcggcagctcgtacagatccttgtcgaccggctccggaggctcgatgtggttcaggatgccgtccagacctgccatcagctgtgcggagaaggcgaggaacgggttgcaggacggatccggagcacggaactcgatgcgctttgcagccggggaggtgccggccagcgggatacggatggcggcggagcggttgcgtgcggagtacaccaagttgaccggagcttcgaagcccgggaccagacggtggtaggagttcagggacgggttggtgaaggccagcacggaggaggagtgcttgatcaggccgccgatgtaccagcgggcaaggtcggacagaccaccgtagttcttctcatcgtagaacagcggcttgccgtccttccacagggactggtggcaatgcatgccggtgccgttgtcgcctgcgatcggcttcggcatgaaggttgcggccttgcctgccagagcggcggtctcgtgaacgacgtacttgtacttcatcaggtcatcgcctgcgtgctgcagagagttgaagcggtagttgatctcctgctggccagcgccggcgacctcgtgatgggaacgctcgaggatcagaccgaccttctgcaggttggcgaccatgtcgtcacgcagatcctgggtgtggtcgatcggcggaaccgggaagtagccgcgcttgacgcggttcttgaatgcgatgttcggggtgccgtcgtcttcggtgtcgacgccggagttccacggagcttcgatggagtcgacctcgtagaaggagcgctgcatgctgttctcgaagcgcaccttgtcgaagatgaagaactcggcttccggagcgaaggaagcggtgtcggcgatgccggtggacttcaggtaggcctcggccttgcctgcaacctgacgcggatcgcgggagtacggctcgtcggtcagcgggtcgacgatggagaaggccacgtcgagggtcttgtgcttgcggaacggatcgacgaatgcggtggaaacgtccggcaccagcttcatatcggattcattgatggcctggaagccttccacggaggagccatcgaacggcatgccgtcggtgaaggcgtccttcaggaattcgcttgccggcacggtgaagtgctgctgaacaccgatcagatcagtgaagcgaacggagacatactcgatgccttccttgttgataagggcctcagcatcagccttggtttcaagtgcagtcacgggaccgctcctttcgaataagtaacttacaggctcttagtctaggaacgcgcgtttcgctcactcgccaattgggttacgagaatgtttcgtaatgacatattcgaaggatgatttcgcgaaaaactggggttcaattgttacgaacgctcgtatttgcctctgcaaaaccgttcaatttgtggacattcgtgtcgtcatgtcgcttgcgacgtccatttcttttctcaaaaaccttaccgcatgcgcgcaggccagcggaaggtaacggagatatgaaaaaaggaacctcgataatgtgttcatcgaggttcccatatgtaagccggctttacgattccaggaaaatcagcggccacgcatagcacgacggctgatgcgctgcgggtgcatcgggtcgacgcccttcggaatgcccatgccgttcttcatctgcagagtgcgcagacgctcgttgaggatgttcagctcggtcttggtaagcatgaagcggctcttcggatggatggctgccatcagcttgttcttgtggctggtcggctggtagctcttgcacttgagcacggtcttgcgcagattcttcaggctcgtctgattcttgccctggccgacgtagatacggtagacgggaatatcggaaccggcggtcacacccttgatattctgctcctgacggtccatggcacgcttgacgcgattgtaatcgccctcgccgagcagataaatgccgttgtaaccggtgccgcgccaaatggcgtctttggtcttcggatcaacccacaccggctcctgcggaaagttgaagccagccttgttaatgttgccgagcacgctgatggcagcaccctgacgcccttcaagcttggcgtatccgactttgtcggcacggttggtgagcatcatggtggcgaacagcaggccaagcatgatggcgaggatcatggacgtgatccatccgatcaccgaccacttgaacacgatgccaagcaccacgaacacaacgatcggcgccacgaacacgccgccgcacaaccacggaagagccttatcttcggcgtgggtgtacttgaagatctgaatgatctgtttgatggtgctctgcttcttctttggctcttctttgtctgccatcgacttcctcacttggttatgcggttactcacactggaacggtagtttatcaggaaccatgccatatcgcatgatttccgctgtttcccctttattgacgaggattatcgggtgtgcaaaggcctgccatccgctttgagcagcgcctctccgaacgattcgctgaacgtaggatgcggatggatgagccttgccgcgtcggcaagcggtacatggttaccgaccagctgttcggcttccgcgatcagatcgctggctatcggactgacgatgtgcactccaagcacaagaggaacgtcaggagcgtcagtcatcgcaccgctgacgatggtcatggatccaccctccccgctcatgagcatacgcgagttggacagcatcggatatgcggtttcctgcggatcgacaatggtgtcacgtgatttcgcctcgctgagcgtaagcccgacgcttgccgcctcggggaaggaaaacacgacttgcggcacggtttcgtcgacgacaggtttgggatcaagtcccgcgatggtttcggcgatggtgatgccctgctcgaacgcacggtgcgccaaggcatgccccggcgtgatatctcccaaagcccatacgccttccacgttcgtgcgcccgtacgcatcggtcagaacatagccacgttcatccaatgcgatgccgttggaagcgaaccagtcggcatcggtgttcggcatgcggccaatggcagcaagcaccacttcgccatacgcggtgagctcctcaccgtcatcactctgcctgtagtgcacggtagcacccaagtttgctccagtgtccacatgacttaccgacgtgcgcgccaccacattcacgccatggcgtttgagctcacgcgtcaacgtcatcgaagcccgcctctcccaagacgacagcacgcgatccttgcgaatgagcaaggtcaccttgcatcccgacgcattccacaatgatgcgaattccaacgccaccgcgccagcgccgataatcaccgcgctggatgggaacgtgtccaattccagagcctgcgtcgaatcaatcaacgctccggaaaacggatcgttaggcaacggcagcgggcgcgaaccggtcgcgagaacaatatcgccgcctgagatcgtaagttcaggtcctacaggttcccctactcccgccttgatggaacgcagaacctgcgtctctcccaaggccggcgcaacatgcacctcataaccatttttcagctgtgcctcgccgcggaacaccgtgacgccgcgatgcgacagcaatcccgccaaccccttcgtcatcgtctccaccgtggacgtacggaagtcacgtaatttgccgaaatcaatgctctgtaaggtggcactgatgcccatacgttccgcctggcgtatgttctgcgcactgtgtgcggccgtcagcaacgccttcgacggaatgcaaccacgattgaggcaggtgcctcccaacgttttgtcgcgttcgatgagcgccaccgttttgccgagctgcgcggcacgcaatgccgtggaatatcctcctggtcccgctccgatgatgacaatgttgaaatgctgttcagtcatgcctgccctcgttgattcgtgcgttacaactggttacatggtaatggagaagccgtcggttttcgccgacggcttgaaaaagcaactgcgattctcgcagaatggatcactcgggccagtgtccacgcttctgatagcgcggcttcggcagacgccagcgacgcatctggatggcacggctccacgcgtaggaaccggaacgcatgcccttggccacggactgctcgccgaacttttcaatgagcttcttcttgagcttgcgccacatgatcacgatgtcgatgatcaccgcaaacagatagatgtacataagcagcatcaacggcaatgccaacgccggccacttgtaggtcacgaaaatcgaaccgatcaaaatgacgaaggcgaccggaatgaagaactcacccaagttgaagcgggcatcgacgtagtcgcggatgtatatacgccacggcagacgctcggacttcggcatatggttgatgtcgcccttctgcatggcatcgtattcggcgttttcacgctcgcgcatacgcgccttggcggccttgcggctcgcttcacgatccttgggaaccagcggacggagattctgcgcctgggcatccttgcgcttcggcgtcggacgccccttgccggcagtaggctccgcagccttcttcccgacaggctcctggtccgcatcttccttcttattaaacacactcatgcctatagagcgtaaattgacgtatcgacgccttgcctcattcatgtcaacgattggacgtgattggttcgacggatacaatggtcattcgatagcatgcggcggcacgtttccaagatgcgtatatgccgcatatataaggaggagcagtatggcagttttacatgccgatgagattcgcgcgcgcgtcgaagcggattttgaccgcattgtcgacgtgctgaacaagaaaatcgcgttgcagtccatttccgcaaaaggcattaccgcggatcatatgaaacagtccgcgcaattcgtggccgaagagctgaacaaggtaggtgtcgatgcgcatgtggtgcagtcgcacaatcccgatggcacgccgggcgcttgggaggtcatcggttcgaaaatcgtcgatatcgacgctccaaccgtgctgttgtacgcgcatcacgacgtgcagccggtgcccgatgccagcgtatggaacaccgacccattcgtcggcacggtaatcgacacacgcctgtacggacgcggcgcggccgatgatggcggcggaatcgccattcattccggcgcattgcaggcgctcggcgacgatttgaaggtcaatatcaaagtcttcatcgaaggcgaagaggaaatgggatcgccaagcttcattcccttcatcgaggagcataaggacgaattcgattccgatgtgatcatcgtcgccgactcgggcaattggtccgctgaaatcccctcgctcaccacgtcgctgcgaggcaataccgatattgacgtgcacgtcaaggcgctgcatcatccggtgcactccggtcagtacggcggaccgatcctcgatgcgaacacgcttgcctccatgctgatcgcttccatgtatgacgagcatggcgatttggtggtaccgggcgtcgcctcagaagatccaatcggcggactgcagcgagatatggatgaggcaaccgtgcgtacggacgccggcatcgtcgattcctaccgtctggccggcaccggttctttggccgcacgtctgtggaccaagccgagcgtgaccgtcatcggcttcgatgctcatccagtggagggatcgttcaacgtgatctcccctgaaacgacgttccgtctcagcctgcgcaccgctccaaaccagcgtccggaagaggctcaggaagcacttgccaggttcatggtcgagcatgctccgtttggcgccgaagtgtgggtcgacaagcttgataatggcatgggttgggccatggatccaaatgccgaggctaccaaagacgccatggacgccatggaagaggcgtttggcgtggctccggtcaataagggcgaaggtggctcgattccgttcattccggaattgcagcgtattttcccggacgcgcaggtactggtcaccggtcccgaggatccgaaggccaacgcgcacagcccgaacgaatccatcagtcttcccagcctgaaaaacaatgtgatcaccgaagcgctgctgcttgacaagcttgccaagtagcggatatcacatatcttttgagaaaaacaacgggcaaatgcgaagggcgttccattccatacaacgaatgaaacgcccttcgcaaatccgccgcgcattcaacaaacctcgtactgcgcagccctgctccgattaattgccagtgccggtaaaagcccaatgccagtaaccggtgaaataagcgcaagacaacgcaatcactggcactgccacacaaatcgcataaaacagccagtcgacggcgttcaaacgtgattcccgggcctgactacgtggagcatccgatccgaaagcacgcgcctccatggcggtggcaagcttcgtgccgcgtcgaatcgacacaaccaataggctgaacgcctgggaaaatacgcgcttgatggcgctaccgtcgcctagtccacgagagcggcgggattgcccaagcgcacgccaatcatcctgcagcaacgtgaacatgcgcatgccagccaaaccgccatatacgaatcgtgacggcaaatgcagaatctgcaccaaaccatcggccagatcggtcgggtcaaggccaagcgcgaggatcacgccgggaacggcaatggccgccacacgtaggaacgtggccaccgccaaatacaacgatccctgcgagaccacaatgacattaccaagattgaccagcacggcaccggaggttttgccatacaatgacacggaaatgaagcttcccgaagctgcgacccataccggccaggttttacgaagcaccgtccatggagcgacgcctccaatccagagcagcagcatctccaacgcaaacgccaccgatgcggaaaccacatccaacgtcacgaacatgggaatgcacaatatcagcgcaccgatgaaacgactgaccggattaatcttcgctacaaaccatgacggcgacgccggcttggcgtcatcatgacgttccctatgcggcaccacgctgatagttttcaactgttccatctcactccccctcgcttacgagaatgcgacgcgcacccagcgcttcgatcaacggctcgtcatgagtgaccatgatgacggaacagcccgcgtcgcgcgcgcccgctatcagcctgaccatttccgtccatgtggtgaaatcctgaccgaatgtcggctcgtccatcaccaacaccttcggcgccgcggcaagcatggacgccacggaaaggcgacgcttctcgccgccggataacgtgaatggattagctggggcgaaccgcttgagattcagccgttctagcatcatatcggcgatggcgtaggcctcgtcatcggttttccccatggatttaggaccgactgccacttcgtcgcgcacgctggacgtgacgaactggtgttccggctcttggaacaccatgccgattcgcccaagaagatccctgcttttccatgtgaagacgttgttctccctatgtgcgggaaccatgctttcatccatacttacccgaccggaaatcggcttgagcaagccagccaaagtcaaagcgagcgtggattttcccacgccgtttttgccggtcagggcggtaatctcgccggcatggaacgcgaggttcacacgctcgccaagagcgaattcacgtccgaagctgagatcctcggttcgcagaacaacatttcccgacgattgattggattcgggaatatggctttcgacggtgcgccccggaacccaggcaccaccttttgtcaataccggcgccatgctgccaaacacttcttccggagtgccgtcggcgatgactccgctgacatgcgaatcggattccggcttaccaagcacaatgacacgatccaccaaatcaagccatacgtcgatatgatgctccaccaccaccaaggtttcatgggttcggtcaagcacaccacgtaccgcatcatgcacttccttgacgccttccggatcaaggttggcggtcggctcgtcaagcaacagcagcccgggatgcatggcgagtacaccagccaaagccagacgttgacgctgcccgccagaaagcctgcgtgtggaacgatcgagtttcatatagccaagtccaacaatgtcgagtgatgaacggaccctgctccaaatctcattttttggcagattcagattttcacaaccaaaagcagtatcatctcccacacgttccagaatcgtctgcgcatcgggatcctgcaataccaatcctgagcgcccacgcgaatgacgggcatccgttccgtcaatcagcagctcaccctcgagttcaccttcatcatcaccgccgagcacgccggcaagaccggccatcaacgtcgattttccggcaccggaagcgcccaacagcaacacacgctcccccggctgtatggtgaaatccacatgccttaacgcaaaatccttacgtgaggcatgccgccatccccaatcgcgcgcgaccaccccggctgcggaaaacggttttcctgcatcagtacccatgaatcgttctttcattccttttgcatttgacattcgcaaggcgaacacgcatcaaagaagtcccgtatccactcaccgtgaatgcgatacgggacttcacaaacgaatcgtcagaccagttcctgcgtgcggccggattcgaaacggtcaagcacgccggttttggcgatggccacctgtaggaaatacatcaccatcccggcgagcactgcaccggaaatgatggaggtgcctaggtagatactggcacgcaccgtgctccaggccgggttggtgatccagtagtacagaccgcagcctatacctgcgagggcgccggcaatggtggtggacagcaggtcccacttcctgtaggcaaagactgcgaagccgatttccgcgccaaagccctgcatgatgccgacgatcagtgagccgccgacaccccactggttgcccatggtgagctcaagcgcggcggcaagggtttccgcgaacaacgcggcaccaggtttgcgcacgataatggccgccaaaggacctgcgaacagccaaaaggcgttaagcaatccttcaaaaccaggggtcaccgctccgaagagagccagtggtgcggtacagacaatgtcccagccccagaagatcacaccggacgcaacggcaatgatggcagccacgacaatatcgactacacgccacttgttgttgtgcttgcgcactacggaagactgcttttcttcaatcataggatatgtgcctttctctctttgacaaggcacgggaatggagagacgtccgtgcgccggcattacccggtatacgttcatacggtcgaagcgtttgcttcctctcagccatacggcccccgtgtctgcgcttgatactacacaaggcacaagattttcacaagggccgtttcattttcgcttcgtttccggtatggaatacgctcggttttttgcaatggcctgtcttcgcgggtttccctcccatactgaatgcagtacgggaacacggttccatagagttttacaggggcctgcgcatcaacgattcagctaggttcctgaatgtctcgccaatatcgtcggcacgtaatgagccatcctcattcagcacggccggacgtccggcctcaccagtctccctcaattccggttccaacggaagctgagctagcaaaggaacgtcataaccgaggctttcggtcagctgttccgacacgcgcgcgccgccgccttcgccgaaaatccgcagacgttcacccttgtgctcgtaatagctcatgttttccacaacaccacgcactttcatcggcacctgcagcgtcaccaggccggagcggaccgcgatgtcggatgcggatggctgcggcgtggtgaccaccaccagttccgcgttcggcaaggcctgggccacggaaatcgccatatcgccggtgcctggagccaagtcaagcagaagcacgtcgggctcaccccaccacacgtctgaaaggaactgttcgagcgaacgctgcagtctcggccctctccaaaggatcgcgcgatcggcgcccgcaaacatgccgatggaaatcaatttcgttccccaagcggtgacgggcatgagcatgccattcagattggtgggttgcgagtgcacgccgaacagtcgcggcagcgagaatccatagatgtcggcatcaatggcagccgtatcataaccgagcgccgcgaaagtggcggcaagattcgcggtgacggacgatttgccgacaccgcccttgccggatgctatggcgaaaatacgggttttgatgcccggcttgttgaagggattctgcttgcgctcggctttgagaccggcaacgagttgggtgagcttgtcttggctcatagatccgacttcgatgcgcggcagcagcgttgcatccgggtaggatgccaccgctccgttgatctggttggtgatggtctgcgataatgggcagccttctaccgtcagttcgacctccacacgaacctcataggtgttcgccttaccttccaccggtatcgcatcgatggctgcgatcatgcccagatcagtcacagatcgacccagttccgggtcgattactttgctgagtcgctcatagatgcgcgcttcgatggtgcgctcgtcggtcatggttcctcctttagccgcgtaccagactagcgtctggagacgcggcatgccagagctttcttgcgattacgttgccagtttgacgtgccggtatcacaccgttccattttccagcagtattttgaactggtcctcgtttagcatgggaacgcctaattcctctgctttggcggctttggcaccggcgttttcgccaatgaccacccaatcggttttcttgctgacggatcctgaggctcttccaccgcgggagataatcgcttctttggcggagtcacgcgagaagtcaatcaacgaaccggtgacaaccactgttttaccttcaagcgtctgcggtagtgtactgatttcaacctgctccgcaccgactccagcagccttccatgcttccaacaccgtgccgcgccaatcgcctggttccttggccgacgcgaaccacgtgaccaccgattccgcgatctccggaccgatgccgtctatctgtgacagttcgtccacactggcgcgttcgatggcgtcaagcgatccgaacgtattggcgataacacgtgccgtaggaggaccaagtcgcctgatggacagggccacaagcacacgccataagtcggcgtgacgtgccttgtcaatttcgtcaagcattttccttgtgttttccgcggggcgtatatataccggctgcacgctggatgctccggaacgcgacaccttggtttcctctcggaccaccatagcatcctcaggcacatcatatccgggatattccgcggatccatcgacttcgtccttacgctttctcgccactgtcggagtcgtccaaaacgccggaacctgatgccacaggcctgatccgccgatacgtttgcgcgtttttttcggtttaccgttcttgccgacggtttcatgaatttcgatgattggcgcttctcgccatacgcgaacatcctgcaaatcggaggatgtcagcgagaacaggccggcctcgctggacaacaccggcgtttgccgggccggcagctccagcccttccaccggctcgtacggttctggctcctgccccggtgccaccacgatttccgtgatgtccggcgcgtaggtcgccaccgaatcagggcgatcctcttctggattcgtcaacgcgatggccgattggtcacccagatgttcgatatcgaacgcctttctggacgccaggttgatgatgcgttcggttaactgcgccgggcaggactccacgttcgggcagcggatgtccttgtccccctctttggctggagcgagttgtgccccacagctcgggcactgcgaaggcatcacgaaacggcgcagctggtcttcgtgcccttccctacgctccaacactggacctacaagttcgggaatcacatcgcctgccttgcgtaccacaacggtgtcgccgataagcacgcctttacgttccacctcgaacggattgtgcaaagtggttctcgacaccgttgaacccgcaacatatacgggcttcagaatagccaccggtgtcacgcggccggtacgccccacttgcacggtgatgtcaagcaactccgtgttgacttcctccggcggatacttgtaggcgatggcccaacgtggcgcacgcgaggtcgcgcccagcgaccgctgcaaccccagatcgtccactttcacgacgatgccgtcgagcgcgtgttcgatgtctccacgatgctcgccgtagtaatcgatcatgtcgagaatctggctgaatgtggtgacctcacggttatgtggcgaaacgggtatgccccacttcttatacaacccatacgcttcggattggttgttgaccgcatcatggtcggcaccacgtttggcgccccactggagcgttccaatgccatgcgcatagaagctcagccttctggtggcggtgatgcgcggatccttctgccgcaggcttccggcagccgcgttacgtggattggcgaaaggcgcgcgcccagcatcctcgttttctttgttgagcgtgttgaaatcgtcccatcgcatgaagacctcaccgcggatctccacgaattcgggaatgtcttcttccggtcccgcaagattctgcggaatggtggagatggtgcgcacattgagcgtgatatcctcgccgatcacgccgtcacctctggtcagaccttgctcgagcacgccgttacggtagatgaggttaagcgcaagaccgtcgattttcacttcgcatgtcatcggcaaaggcttcgtctcaggccaatcaagtccccgaataacaccgtcgtaccattcatgcagttcctcaagcgaaagaacatcgtcaagactcatcatgcgagacgggtggcgtaccgatgcgaaatcattggagaaggtgcctccgacacgatgcgtcggcgattgcgcggaatcgagggatgggaactgggcttccaacgcctgcagacaacgtattctcgcatcataggcggcatcggacgagaccggcgcgtcatcgatgtagtatgcgatctggtcggattccacccacgccgccacacgcgcccacaatcgagccgcggcttcagcactgatggacgagacatcaagtcgggtcaaccgcatggcgtcggcatcggttggctgcaatgcggcgatccagcgttcactgcccggcgcatatgagctgactcccccgtcgggaaccacagcggttgacgcggagcccgtatcgccgcccatttcagaagcgtcaaaatcccatgcgagttgttcggaatcgtcatgccttgtcattgtcattgccttgtcactgtcttcaatgttttgccggtcagagccgccatgcacacattatcgcacaaatgttcgatttactgcatcgccaacgtctgtttggcgcactgcggaaagcacgccgttcagttgttcaacgacctcaggaactgcatctgcaccacgtcggcaccgtcgcgctcctcgtcatccatccttgaagcggcaaccgaaagcgtacgtgccggcacgaacatgccttcatccacacagacccgcgcggccttgcgtaccaaggatgcgacctgggtattgggccataccggcagtcccgcttgggtaagcacgtgcatggcttccggaacgtcggtgggcaccggaatgcattgcgattgcgcgcgtccgatcaattcctgcagctcgctctccagcatggcgattcgcccgggggcaatctcctcgctcatgatgtacgcggcggccgcgatgtcgaagtggtcacacatccattccgcataggcgagtctgtaataggcgaacgacgcatcctcacggtcaagtgcgacgtgcaacgcgttgaggcaagccgctctggccggatcccaatcctcggcgcgcgccagttgaaccgccagcttgagatgggaaagcgggtaggccggcgcatatcgcaccatcgcattgagatgcggcaacgcggccttcacgcctttgacctgtgcaagcacgtcggcgagttccatatgcgcgtagaacagattgtccggaatcagcacggtccgttcgccttccgtggcgaacatgcgattgtagatgacgcgttccgcatacgagttgaaataccgcggcacgcccggattcgaagcgaacagtcggtccattcgctccaacgccgcttcggccagttccacgctttggtcgacctgtcctgagaacagcaggtctctcgccttgatgcgttccgcgtcaagctcgtcggccaagcggaaggagaagtccggagtgtctttgccatcgatgagcgcactcgtcacctgcggagccaacgacgtcaattccgggtcggcaatggtgttgatgacgtccatggcctgctttgccttggccaccgattccagatgggagtcctgcgcgattctgtggaattcgccaaccgcgcgctgcagcaggtcgacgcgctgaatggacaaccccgacatgtcacggcaaccgaacagctgtgccgtgtcatggtcgaatatggcgtcggaaagctcaggctcctcctgacttccggatggggagaaacgactatcgcgcaaatcgaacgtggcgtccactggcttcaatgcgccgaggccgtccacatccatttccgcatcgaacatacggtatgtgcctgttggatcagacaatccgcactcgcccagacgctccatgaattcgcttctggtgaaggtgaccgtcaccagattgcgtacggtcggattcttgcgaagctggcttaatggatcatcaccattcccatcgaaatcgccgaagccgatcagtcccgcgtcaagagcgccatcatgcacgccctgtgcggaaccgtcgtccatgctagaggaatcgtccgcaatctcgtcgggaaccgcgaacgtcacttcgtcgaagtcgatatcccgcatcagatcctcgaattggctgttcaacgcatcatccgtatcctcggagttgacgccatcaacgcccatgtcggcggatctcggcgccaccggacgggacgggtctccgtggaaatcgccgtccttcggatcggccttggacccagaaacacccatatctccagtacgaatgcgttcgaaagccgccaaagcctcgctcatcagctcgctgatggcggaatcctgctcggccacggcctcttccaaaccaatcgaatcgatatgcatcgacacacgctgtatgcccggatcggcgccaaaactcaacgcggccatcatcagtccaacacgcagattgtagtccgcgctcatgcgggcgcgttcggcgtccgtcatatccacccatgcgtggcgggacacgtcatatttggtggatggcatcatggaaacgccggcagaggtgaaaccgatggccatattgccgtctcggagactgcatcggaagtccacgtcgaagcggtatggcaggcgcatgctgcgcaatagtctcgacattgtctggcggtatacccattccgaaccgccttcggctccgaaggcggtaccatcctcgccgtccttcgtgttttcggcgatggaacgtctggtttccgcggcgatgtccaccaggcgcatgacggcttggacgccgtcatcctgctgtgagtcgaggatcgcgccgaattcgtcgtccggtttcaatgcgatcagcgccggattttccagtagcgccatgtcgatttgcgcggcttccgcgcgggttacggtgtcttctgtgggcagcttgccgatacgggcgttgcgttccagccatgaactgactgcggcgaaacggttgaggttgccttcgatgttcagcgcgcgcagcgatgccgagaacggcagtgtggaatcccaagcgaagaaatagcagcccgagtagctggacgtgtataggtgcaatggttccgcgccgtgtactgcttcgagcccttggtctttgtcaagggcgcctgcctcgcgcatgaggtcggcgaaataatcctcaagtccggatgcgcgcatgccatgggagcgtgcgctcatcgtgtctctgatggatcggcggatcgcgcccatcggcgcctctcggttgagcctgcggaagatgttgcccgtgccgaatcccacgagtagcccgttcatttgcggcagcatgtaggctgcgaagaatgcgatggtgatggcatccctgtattccagatcgaatcgcatggtttccggcaggttggcacgcatctgttcgagcgtgtagcggttgccgactttcagccaggatgcgagccacatcatgcggccatcgggcatgcgtcccacgacaccgccttgcgacgcgcgcaccatcttcggcgcgccgtttgtcgcgtgtccgaatcgtggaccgtctggcagggtgagggtttcttctttgacgaatatgaatcgtggttccagatcctgcacgtccatttcgggattggtgcccgcgaagacgcgtgctttgctgtcggcgagcgcgatttgcgcgaagtggttgttgtcggtgaatagtccgatggagaaggctttgccttgggtttgtggcagttgcgcccagccgagttggagtgtgcttggtatgccttcgaagcctttgatgatgtgtcgtttgatgagtgggttgagtttgatggcgttgcgggtgagttcatcgacgatgtcgtctggcgtgtcgagggctttgccgaaggggttggcgtcggcggtgttgtgggggtgtttgttgtggttgatgagttgtcgtaccccttgcatggcgtggttgagcatggtccgtccttggtgtggatggtgtgctgatggcgatgctggtgtgaggtgtgacatgtgggccattctttcaattcaatgcgacatgcagcctttagaataaagttcgtgactttttcgaaacagcgttttcaggcgcgtcatcgtgtgtgcgcagctattgtagccgcttttgttgtggtggtgttggttgagtgcgtgttgtgtaatgtgccgtttttccgctcgttggcggcgtcgggtgattcggcggctgcgtataacacgttggggccggggcttgagcgtcgtgatgacgggttgttggaggttactgatccgacgcaggcgtatttgcaggtggctgcggatggttcgtctgagtatgtgcggatcgtgccggtgtccgatgaggttatgggtggtgtgcctgccggttcgcgcgtgttgcgtacggtgcgtgttcgtgcggatgcggatcgtgtggctggttcgttgtgttcggtgtcgttggattcgtctcgttcgttgtatgtgagggctgcggccggtcgtacggtgcgcgtgcaggtggtggagccgaaggggtcattgattccgtttgatgcggttcgcgcgaatgtgcgtgtgccgttttcggtgagtccgttgcgtgtggcgttgttggtgttggtgatggtgttggtggcgttgtggcgtccgggctcgcgcctgtggaaggtgccgttgaatacgtcgagtgtgcgtcagcgtgtgacgttgggcgtgttgttgacggttcctgggttggtgactgttgcggcggtggcgtggcagttggtgtctgcggtgccgttgagttttcatacggatggcatgtatacgtatgattacgatcagtatgatcatgtggctcgggcgttgcttgatggtcatgcgtggcttgatttggatgtgcccgacgcgttgcgcgatgcggataatccgtatgatgtgacgactcgtcagcaattgcttgccgatggtgtgagtccggtgtattgggattatgcgttttttgatggtcgttggtattcgtattttggcgtggtgccggcgttgctgttgtttgtgccgtatcgtgcgataacgtcgttgtgggttgatggtggtctgatgatgccgtctggcgctgcggtgccgctgctgatgtttgtttttttggtgttcgcgtgcctgttgacgattcgcgtgatcgagcgtgtgcgtccgcatgtttcgctggctgcggtcagtatgttgtgcgtgtttgtggttttggcgtcgaacgccccgtacttgtggtatcggacgaatttttattcggtgccgattgcggcgtccttgttgttgagcacgttgggcttatggctatggatgggtgcggcgcacccgaacgcggccgatgccggtggcgatggtggtgcgaatacggtcgaatcgttgtcgctgcctcgtttggctgccggttcggtgtgtattgccgcgaatgtgggttgccgtccgtcgtttgtggtggtggcgtttgccgcgttcccgttgttctggccgcagattcgtgcgattgtggggcagttgcgtgccatcgcgtctggttccggcgtgcgtgggcgtgcgcgcaccgtgttgcatgcgttgcgcacgcctttggccgtgctggtgcccgcattggttgtggtggtgcccttgttcgcctataacatggtgcgtttctcctcgccgttcgatttcggttcgtcgtatcagctgacggttacggatatgacgagttaccatcagtcgtggtcgaattttgtttggacggtcgcatattacctgtttctgccgttgcgttggacggatacgttcccgttccttgccgtcgatcccgcgcctttgaaggattgggggtttgcggaggcgatgcccggaggcctgttcgtcatggttccgcttgctttggctgcgttggcttgcccgttcctacgtaagcgcatgcgcgttcgtggccatgccggcatgtggcccacattggtgatgttcctgctgttgggtttgctgatcgtggctcttgacgcgcggctgggtggccttggatggcgttatatcgccgatttcggctggctgtttgcgttggcttcgcttcctttgatgcttattgcgctggattgcgaacgtccgcggcttcgctggctgttgcgcgtgctggtgttggcgctgctgttgttcacgttgtcgttgacggtgttgtcgttgttcctgtacggccgcgacgacgagttgattcgtaataattccggtttgtttcatgacgtgcagtcgtggttcaccctgatgtaagttacggcgttttcagggttatttcagggttttatcacaatttttccaataaatcattcggcttgttccgagttttgcggataacagtggcgatgtaactgttcgctgtgagatgaacccttgttggagacatcagtcatgaaatcgcttccacttttgtcgaaccatcctcgtgtaagacgctggaccgcggccgtcgtcgcatcagccgtcgcattgggcgtctgcctcgccagctacgacaatgtcgatgcggccatcaaacaaaacaggattgaacgactgaacgcacgtatcgagaacgtgtacacagccgactatcaggatatggccgacgacaagctcgagcaggaaaaaagcaggtcctccgcaacagaggatgacatgtttgtcaccgaagatccgtacggcaccaacaccacgtcactgtatgtgtatttcactaccgacgacgcggttgccgtctcctataccgtgcatgcagacggctatacggatttcacccgtgacgcctatcaggaatcgcaatacagcaaaacccacgaattccagctgctcggcctcattcccggcgagaagaacaccgtcgccatcacgctgaccgatgccgacggcaagtcccgcacgcatgccatcgaacacaggggcgcatccctgctgggcaatgaggaggtgcagtcggagaagaccgtcgcagccgattcaggtgaggatctgggcggcggcctgtatgcgattctcggcaatgattccgacgaacaggatttcatgttctactacgatacgaacggcgtgctgcgcggtgagattccggtgctctactatcgttcgcaccgtctgctgttcgatgatgacggtctcatgtggttctccgcgtccacgcatcatatggtggcgatgaaccgtctcggcaagctggagaagatctacgatctgggatccgactacattctgcatcatgattatgcgatggattccaacggcgacatcgtgctgctggccaccgagctcggccgtgacgacaacgccgtgcaggatcaggtcatcaagctcagcacttccaccggaagtgtaacccgcttggtggatttcggtgagctgttcgccgactataaggcctccaccacgcatgcgggaaccgacgagtcggattcgaatgccaagaatcgttgggattggctgcactgcaataccattcaattgttggatgacggttccgcattgttctccgcccgtgagacgtccaccatcatcaaggtggatgatttggaatcggatccgacgcttgattatatgatcggcgagccatccgtgtgggccggcaccgatgaggccagcagtttcctgacgaagtccggtgatttttcggataccggcggccagcattctatcacgtatgtcgccgatgattcgctgcctgacggccagtattacatgtatatgttcgataacaatttcggcacttcgttgacgcgtcctgattttgactggtcggtgatcgacggcatttcgaccgaattgtcgtccgatacggcaaattcgcggtatcgcaagtatctggtcaacgagaatgccggcacgtatacggaagtgtcatcgttcgacgtgccatattcgccgtatgtcagttccgcgcaggaattggataatggccagatcctcatcgactcgggcatgaagggtctgttcggccagtacaacaaggatggtgatctgctggcgcagttcaagatgacgttgaacagtgcgtacatctaccgcgtgtacaagtacgatttctcgggattctatttcgcctgacatcctgtccgcaggcttgacggggccgggaatctaaactccttgtgggagtttggatttccggccccgtttcgtatgcaatgggttcggcacgcccgtacaatggttgccatgggttttttcgattcgctgttttcatccaaacgtcccgaagcgacgcatgacgtcacgttcacgctagatcaggcaggccacacgtatgaggatggcaatgtcggtctggagccgacatcgttgacgatcactccggaaagcaaacgtgtggctgtgatcgggttgaatggttccggtaagaccacgttgctgcagctgttggatggcgcattgtctgcgacgtccggttcggtgcgtatcgacgcgaatggtgctgcgtatgatccgtcggtgaaacgtgatctgaaacgtatcgaatcgatgatcggccgcgttcgtcgcgaggaaattccgaacagttattacaaagcggattccattcgcgaggcgattgatgaaccgttgaagaagcataaggtgccggaaagcgaacgccaggcgatcatcggcaatctgttcgcgcatttcgatctggcggcggtcgcacgtgagcccgcctccgcattggatagcgagaaacgtcatctgctggcgatcgcttccgcattgagcttctcccccgcggtgatcgttgccgacgagccgaccaagggtttggacgaggtggcgtccgcgcatgtggcgaaagctctgttcagttacgacaaacaggtagtgttcgccacgcatgacacggagctgatcacacgcgcggaatatgcgatcgaccgcacgctggtggtcgacgatcatcaggtggtgttcgacggtggcccgcatgaggccgtggccttttacacggacctcatccgcgctaaatatgaggcttccaaagcctgaccatacccacggattattcccgttccccacatgttgcggctccttcatcggtgtcgacgatggaaccacaacatgtttcagccgatcattgtgttgacggtgtcaagcaccgtctgaacgttatgcctgaattcgtcgggttccggcaataacgagatcgcgagatagccgttcgacgtcatatcgaagaaatagccgggctgtcctgaaattccgtgcttttcgatcatggacaacaccagttcgttctcgtcaagcacgctgggcacgcgcaaaagcacattccatccgccttcggcacgcaacacgctgaccatgccctgctcgtcatcatccagcatggtatgcaaggctgcgaggttggtttgcacgcgctctcgcacgcgcgcggtctgcgcggctgcggcgcccagcatggcggggatctgtttggcgatgatctcactcattggcagatagtcgtcggcgaccacgtcgagtctgcgcttggcctcatccacttcagccgccgggccggacacttggatccaacccactttggcatgtggcgcggccaacgtcttcgagaacccatccaatgcgaatgtgagcgtgccggtctcccccgcgagacgcgcgttgccatcgaatggttcaagatcatagtcgtagaacacctcatcggcgatgatggccacctcatggtcatgacaaagccgcacaatggcctcacgttccgacgctttgacgtacgatccggtcggattgttgggattgatgagcaccagcgcgcggatgcggccgccatcttcaccttcaagcgcttcgcgtagttcggccacgtcgatgtaccaggatccgtcgaaacgttgctggtactcgatcatgtcgacgcattcgagtcgtgcgatcgattcgatgagcggatatcccggcttcggtgcgagcacagcgtcacctgcattgcagagcagtttgatcagccatgagtacgcttcggacgtcgagctcaatatgtataggtcgtcggcggtagcggtattgccttgttcatgcaggaatgcggccagcgcttcgcgtgcgtatcgttgcccgcgtggctccgctccgtagatgtccggcaatagttccgacgcgagcgcatgtttggttggattggagtcgttgagtttgccgagtgtgatgccgtttgctttggcttccgcttcggctttggcgatgggattgggctcgctgatatcgactctggaggaaaaacgcatggtctccaccatactctctgggttgcgcaagtgttgcatcgagcaagaaggatgcattcgccatgcgatcatcagaggaataacaagagccgtacgacggatgaatcggacggctctcgcttatatgaaggttaggaacctttatggttcacgacatcacttctgcttgatgcttgcgtagtacgcagcgccgatgatgccagcctcattgtgcagcttggctgcgacgatcggggtcttgatgtcgatgtacggcaggaacttctcggacacgcgggacacgccaccgccgacgacgaacagctgcggatccaagtagaactccatcagggaataatacttggtcagacgcttggcccacttcttgtagcccatatcgagcttttcacgaatggaggatgccgcgtacttctcggcgtcacccttgcccttgagcagttccaaatggccgagctcagtgttcggaatgagctcgccgttgaagatcagcgcggtgccgatgccggtgcccagcgtggtggcgacgaccaggccgtcctggcccttggctgcgccgaactgctgttcggcaagaccggccgcatcagcgtcgttcaccacggtgaccggacggccgcaagcttcggagaacacttcggtgacgtccacgccaacccaagactggtccagattggccatatagccgagcttctcgccaacatgaatcggagcggggaatgcgatgccgaccggagcggactcaggaacctcaaaatgctcgagctgctggcgaacgatttcgccaacggccttcggagtggaaacctccggggtgaggatcttcagacgcggttcagcaaattcgcccttctcgaggttaaccggggctgccttaatgccggagccgccaatgtcaacgccaaatgcctgtgcagtttcaatcatcttcgacctctcctatcaaggtacatagtgggtatatcgaaccggtaaacgccatagtagctcgacccatgccccaaaacgcgccgacaatacacaattggtgaatacgattgcataatctgtcgcaatgaaacgcaaatatttgcgattgttttctgcaaacgattcgccccatgccaacgcaacgcatcggcatggggcgaatcataagaaaataaccgtctgaagacggtgtagccacattacttgagcggcggcatcggcttccaatccggatcatgcagcagcttgcgcgaatcccaccaacccttggcaatctgcaccaagccggtcttggcatgctcacggtccaccatcaccaagcgaatgacctccttggcggcggtcagcaacgtgccaaagccgaacatcagcggacggtaatcgccgaacgacatgaaatagcgtgccatgtagccacggttgcgcatgatgtggtagcggttcatgtcggaagtggagttgagctgacgcacgccggcgatatcccagttaccgatctcgcgcgtacgtcgcaggatcacgtcgggcaccacgatcggattggtgaccttgctggcgcgatagccgtacatcgtatcgtcccagtagatgaagaagcggggatccggcaaaccgatctgttccacgatattacggcggaacaggccgccttcaaagcataaggtgtccatcacacgatagccgggacgcccgaacgcggccggagcgatcggattgggaatgccaagaggcacgatgaaatcgtactgccagtagaacgggcctccgtcgtagtcgtatcggcttccctggatcacatcatggctgccggtccacttggcgagcctttcgatggcctcaggcatcacggccacgtcgtcgtccatcacccagaaccactccgcacccagctcgtatgccttcttcacacctgcggagaagccgcctgcgccgccgaggttgtcggattgcggcgcgtacaccacacggctttcgttgcccgactggtcggcgatggtattgccccactgcgcggtgaccgcttcacggaaatcgtcgaccatgccttgggtcgcctcgctgtgctcgttgtccacgacgatgatacgccatggcgccacagtgagtttttcgatggattcgaacagggtggcgagcagctgctgacgcctgtacgtcaccacgacgatagccagcttttcgatggtgttcttcgcaacttgcttttcagtcatacgttccattcttgcactcgccctcaaccgaacatcgcctgtgttcgcatcatgcggcacgattccattcgacggacgggctcttgcacatttcgtgcggctttgccataatgtacggcgtaatgcaggggaacccgtgtttgtcgggttgagatgggccaagtgaggcctgaaccctttgaacctgatggttaacaccagcgtagggaggcatgtctagtgactgctgtgacatcaacaaccgatttcgattatgagttcgacgccgccaaaggcatccaacgcgacaatcttccgccgttcgcgcagcgcatgcgcaaggccgccgacctggtttgggaggaaggctaccagcagccgttcatccgcgagcttggcgaaggcacactgcaacgcgagcgtttcgccttctatctgctgcaggattttcgttatgtgaacgattacgccagagtgcacgctttggggttggccaaggccaccgaccctgaaatcatggcgttcatgctcaaggtgcagaacggcgccctgcaggtcgagaccgaagtgcaccgttcctacttggccagctatggcatcaccgaagagcagatgaataatgtgcgccagtcggccttcgcgcgcgcctacacgtcgaacattctcttcatcgcctacggcaaagacattctcgacattctcgtggccgtgctgccgtgcgcctgggtgtatgcggattacggctaccgtcttgccgtcgagttcgcggacacgctcgacgacaatccgtacaagagctgggtcgacatgtataagaccgacgagttctggcaggattccgtgtggctgctcgatcatatcgagaaactggtggccgacgcgagcgaggagcgcaagcgcgagctgatcgacattttcgtgaccggcgtggagaacgaatacatgttctgggccagcgcgtacgacatgcagtacacatggaagcccgaatggaatcaggcgcgctgatagcactccttcatggggtttcctgactttcgattgtttattttcattgcagcaaggcgggtgtcttctgattggttttcagaaagcacccgccctgttatgtttggtcgcgtcagtttcccgctttattcgcgtacgaggcggatatgttccacgtcgtcgcgatgggagcggcggtagagcacgaaacggttgccgatgacctgcacgagttccgcgttcagttcttcagccaatccctcgcctgcctccttggcggtcagaccggatccgtcgagcacggagcacttgatgagctcacgcttttcgatggtttcgtccgcctgcttgatggcgttttcgctcagatcgttcttgccgacctggatgagcggattgagcttggtggccaggcctcgcagctgcttgacctgctttttggttaatgccataactaattccattcttatctgtgatgcttgctcaagagtagcgtgaggacggtaaaatccgccgactgccttcagtttagtccagcgatcagaaccaacgcagccacatatgccacaaccacaccgcccgcggcaatgtctcgtttggcgatgctcatcacgcgccaatgtgtgcgtgcgataccctcttcatagcatcgcgcgtcaagtgcgagactgagattgtcggcatggcgtatcgcccctgcgaataccggaatgatgatggaaaccatcgccttgatacgctgcacgaacgttcccgtttcgatgctgccacctcgagctgattgcgcatccacaatggctttcgcttcgcctcctaacgtgggcaggaaccgcaatgcgaggctcatcaccaacgcgatctcctgcgcatgtatgccgaattttgcgaaaggtttgagcaacgcttcgaatgcgtcggtaatggccgtgggagtggtcgtggcaaggaataccgctccgacgataatgaccgcaacgaatctgcaggcgtacagtatagcgatacgcacaccgtcgtcggtgattggaatcggtccgatgttcgcaagaacattgccggatcgtacgaagaacacattgagcagtccgcagaacacgaacaatgcaaggaacatgtgaatcgatttgaacagttgtttcacgccgatgcctgatgtcgcaacgatcatgccggtcaacagtgcggccaccagtaactgccagaaggagcggatggcgaatgcggagaacatgaccgccaacgcgctcaccatcttcacgcgcgggtcaagccgttccataaaactacggttttcacggacgtcttcctttgcatgtccggagccaagcgtgtgcagattcttcgaacctgccgtttcggaagtgacattggttccgatatctcgagtgacgtcattaccgttttgtctgcgatcaagcgcgatcacccgatcggcgagcacgtcgatttccgtttgcgaatgggaaatgataagtacggtgacgccttgggaatgaagggtttggatgagatcgtgcacgcgggttgtggccgcttcatcaagtcccgcggtcggctcgtccataatgagaatccgcggttggcatgcgatgacgcccgctatggcaacgagtcgttgctgcccgccggaaaggtcgaatggcgaacggtcggcaagatgttcaatatgcagcaatgccatggcttggctgacatgttcatccacttgcgcttcatcaagccgttggttgcgcggaccgtaggcgacgtcctcggctacggtttcggcgaaaagctgacgttcggggtgctgcatgacgtagccgatggtggcgcgcagtttctcgcggtccgcacgcttgagcggctgcatattgccgttggcgcgttggcgtgcgacgggaatggtgttgacggtaatgctgccagattgcggctgttccagcgcgcagagaagacgcgcgagggtggttttgcctgcaccgttatgccctgtgatggccacggtttcaccctcattgatggttatggaaagcttatcgagcacaggcttgctactgtttggatattgatatatcagattatggatttcaatgattggtacagctgatgttggcttcgatgcgccatttgcaatattggatttggcaattgggttgtcttcttgcgctgtgcctgattcgtccatttccggaatacttgcagtattaccgcgagcgctttgcacgatacgcccgttatccaggcgaatgatgcggtcggcattgacgaattcgtcacgatggtgggtgacgagaatgatggttgtgccgtgctgctgcaattcgtcaagaatatgcatgatgtcggcacggccttgcggatcgagcatggcggtaggctcgtcgagcacgaggatttcgggattcatggcaagcatgccggcgatggcgacgcgctgctgttggcctccgctcattcgcgtgggatcggcttctcgttgtccgctcatgtcgactgcgtcaagtgacatggcgatgcgcatatcgatatcatcatgcgcaatggcgaggttttccggaccgaaggcaacatcatcctcggtgacggtggtaacgatctgatcttccggatgttggaaaaccgccccgataccatgccgggtgctgcggtaagcatcagcgtgcgcgccggagtcatcgaatacgttgtttcccaacaacgtgacatgtccggcatcgggtgcggcaagtcctgcgatgatgcgtgaaagtgtggatttgcccgatccgtttggtcctgccaagcatacacgttcgccttggcgaacggtcaggttcacgccgtcgagcgcccaggtcgcgccggagtcgtaggtgaaacgaatatcgtgcagttcgaccgcgatggtgttcgtggcgctgtcaggattcatggaaaaagtctttcataaacgaaaggaaccttccatacgtcgaaaggttccttcctattcatcaatatgcggaatcgatatggtgaacgaggctcagcggttcaacaggttggagatcggcttgtagatcaggaaggtgaccacgccatggatggtgaatttcaacgcgttgaacggcagaagcgccggcacgatcaatgccacgacctgtgcggtggtcatatgcgcgtagaacggtgtgacgattatattgcccacaatcgccatcgccaaggctgcgatcgcaccgacgatgatgccgatgaccgcgcctttgcgggtcttgttcctgcggtagatcagtgctgccggcacggataatgccaaagccacgagcacggccataagcgtgccccatgggttggtaaacaggtgcggcaggaaaccaagcacgctgacgattaccgccgccgctggcccgtaggcgaaacctgccaccaggctgacaatgccggatggatcatatttcagccattcaacgcctggcacaatgggaaattccacaaagctgacggccatcgacagcgccacgaacagcgcatacatggcgatgcgtttggtggaccagcgtccagagtcggccacgcctgtggaatgcgcgttgtcggggcgcgtcatgctttcgctggcgatttcggcgtcgttgttttgggtattgtttggtgaggatacactcatgttgagccccgtttcttccatccggactttgaccgttggctccggattctcaccggatcagccgctttcgcgggtcgcgggcttcggcatgggaccgttatgaacgtcagtcgtaccgttaccgccagtaaggattttcaccttccctgaaacttgcacgattatatatacgcctatcgtcggaaatatgcaaaccgcgtctcactggcgtctattatcagcaggcatcaatctttaatccggaaaccatgatcttagcctcatatgccttttgcctatggcatgaacgtcgcctcatggtgtgttgccgcagtgtgcgctttacctgttgctttcgtatcgtgtgcgttcaagcaagcggcaggtacgttgattgttatgccagcaggtcgagcaagtcgtctttgctgagtgtgccgacgcctccagatgcggtgccgtcggtgaactgttgggcaagctcacttttcttctcctgcagtttgaggatgcgttcctcaatggtgtctttggctacgatctggtacacgttcacatcctgcgtctgtccgatgcggtgcgcacgatcggtggcctggttctgcgcggccgcgttccaccacgggtcggcgtgcaccactacggacgcacccacaaggttcagccccgtattgcccgctttgagcgagatgaggaacacgggaacatcgttgccattgaattcgtccaccagttccacacggcgtttcttcggtgtctcgccggtgatggtgtagaagtccacgccctgttcagccaaacgtgtaccaatcaggtcaaggaatgaagtgaactgcgagaatacaagcactttcttgctttcgtccatgcacgtggatacgagttcgcagatggcgtcaagtttggcggaagcgtttttcgcatccgcatagacgagtctcggatcgcaacagatttcgcgcaacagtgtgaattccgcaaggattcgaatcttcttcgtattgaagtcggcgtccttggttttggtaagggtggcgcgcaaccgttgctcgtgcgccgcatagagtttgcgctgttcgccttccagcttgacggtgagcacgttttcgaacttgtcaggtaaatcggtcagcacgtcttttttcagacgtcgcttaatgaacagtccgaccaaagcctgcagtttgtcagccatgacggaatgttcagaaccgggtgccatgatcggctgttcgtatttttctcggaacttcgtgtaggttcccagcaatccgggcatgaggaagtcgaagatgctccacagttcgctcaaccggttttcgatgggggttcccgtcaatgcgaaccggtgttcggcggtgatctgtttgacggctttcgccaacttcgtggcatggtttttgatgtattgcgcctcgtcgagtgccatcaatgcgaatcggcagtcggcataatcatccacatctcgacgcagcaaatcgtaagaggtgatcaccacatcggtttgctgcgtttcgttggtttcagtcgaattgttccattgctgtgccacggctgcgatgagcttgcgccggtgcgctttcgtgccggccacgacttcgatggtcagatcttgcgtgaatttttcgcattcggcggcccagttgtataccaaggacgccgggcagacgatcaacgcgggaccactgcccttgcgagcttccaccagtgacagcaattgcacggatttgcccaaacccatttcgtcggcgagaatgccaccgaaacctttgtcccacaaggtggaaagccattggaagccttccacctggtatgggcgcagtacgtttttgaggttgcggggcacttcgtatcgttttgggtcgatgattttcacatcgttgacatagtcgacgaacgattcgcttttgccgtcgtcatcaacttgagcatccaagaggaacgcccgatatccgggaatggtgattcttccggaatcaatctgttgctcatcaaggtcaagatctgtgacaatctgatcaagttcatgcagatcggcattcttcagatcaacgaacgtaccgtccttgaatcgatggtagcggcggttcctgcggtaggaattcagcaacgcgccgacctcgttcatcggcacttcgtcggctatcggcgaaatctcaaccagattcgagtcgatggacagtccgaccttcactgtagggctgcctggcatcatcatgccgtcgaacgcggccgtggagaacacctgcccgaccgagcgcaagatatccacgccttcggtgagcaagagcagaatagtctgttcgtcttcctcacgaatccgcgccacatcaatggaactccatgtcgggaaaagctggcgaaccacctgcaccgcgaatgattcgcgggccgtatctcgtttgatgagcgccgctttcgaccgcgagtccggattaatcacgcctcgtagcgctttggcggtcggcaccaactggaacacaaaatcgccgtatcgtgccacagcctcgcaggtgatgccctgcagatcacggtccaagtagaattcgatctggcagtcggctcccatctgttcggcgacttcctgtggaatgtcgaaaccaatgcccgcttcggtaagttttggcagtattgttcgtgcgaacatgggccagtcgttttccgcaatgaacacaccatcgctaacgttcgacgcgcacaatgtcatcaacgcgtccactgcgggaaggatgctgtcggtacaacggaagagtccgctcactggcatcatatgggaatccatcggagtgccgttatgctcggcacttatgaggtacacgccccgctgcccaacaatccgatccgtgatggtacggttcgacgtgatacgcacgcccgacgaagcgccttccttcacatattcggcgatgaaccgaaattgcggattgccatcgaatatggcgatagtatgcgatctggactcccctggcgtggccacttcgacatagcccggagcggcgtcatccgtatgggcgaaatcatccggagtgagctgccgcgccctctcacgcccctcatgcttgggagcttccagcggcccgcgtgctatcagcacgtcttcgatgtagtcctgttgcggttccgcttcgaacaggttcagcagatcgcacaattccccatcggtaagcatgatttcacgttcgatacgcacgtctggcgcgtaatagtagttgttctgcagttgcgctgcggcacgtgatccaacaacaccttgcaggaatcggaacagctgcagcgagaacggttcgagcatgtccggagtgtgggtgaacgagagtttctgcccgtatgacacgtatgccccgttgtgcatgtcggctacgaatttggaaatgcttttgatgatataacttgcgtcgccgcagccgattttcaacgtcaggctccacagctcacggttcatgatcagcgtgggctccagacgcacgcttcccggtttcactatgatggaaccgctcttgcgttttgttttcgtggccccttgcgtaatgacgcctcgttgctcgtcggcgagacggcttttcgcgtcgacgatgcgcttgagcacgtcaagctgcgcgctttgaccggtattgtcattcttcgcatccagcgcacgcatgtagtcggataggatatgcgaggtcacgccacttcgcttgaatccgcggaaccgttcgggctggtcaagaaacagcagcagcattgcggcgacatgcttgcacatgccggtatagcggcgccccccagccggatccgaatcgaactcgtcatcgtcctgcacatgaccgaacgtcgatcctgaaccgaaatcatcataatcatcgacataatcgtattcatcgtcatcatcatcgaaactgcgatattttggattgttgcggtagctgggcgaatatgccgacgaatacgtgccataaccgtgctgcgaaccgttgaacgcggggcacgagcaatacctggccaagaaaagctcatcatgcaaatcaagcgtggcttgcacttcgtatcggctggacggtgaggtggtgccccgcatattggcatgcagggtgatgcggtcggaatcggagtcgttcaggcaatgcagatccgacattttcgcacgccactggttggcgattccacgggcacgctgcaatacaggctgactgcattcgctgcgtagttcgtcggaaagccctgacaaagtatccgccaactgaaccccaatcgttcgcacatttgttcttatgaaagagtatcagcacagcggaacaggaaagccgtggctgcaatcccagccacggcttcgctccatacaggttatatcagcggcaacgcttggtgagcggctgccatggatcgagttccaccggttcggattccagcagcggcccgatctacgctggttggtaatggagccctgcttcagttctatggagaagtcgcgcggcagcgagcgctgacccttgtaatcggtggcggcttcgagcacgcccacagataccgtcgcgttgaccgtggaaccgaccgataataccggtacaggcatgagaaccgctataacctgtgcagctgcgcgatatcatcgcgcagctggttgacggtgtccgtcagttcccgcacattgtggcgcaactgttccgtttccgattccgcctcatccgcacgcttgtcggtctcgtcacgaacacggtcgacaatccatgaagccagcgtcgcggtgacgatgccaatcagggcaacgccggttatcatcagtccgatggcgatgcatcttccctgccatgtcaccggggacaaatcgccatagccgactgtggtgacggtcacgaacgaccaccatatcgcttcaccgaaatcggtgatggaagcgcctggaaccccacgttccacatccaattcggcaagggcgccgatatacatcagtagtgtcacgctgcagcatgtgtacagtgtgatgcgcccacgcaccgccatgccaccggtacgattgagcacgttgagcactgccaccagacgcagcagtctcaatggcctgaagacgggcaatgcgatggacaccagcatcagcagattgtctttgaaccaggttttcttatcttccgccagcaggatcgaaacgacgcagtcggcgatgaacaccatccagatgatgttgatcaccatttcacacaacaggatatgcgtcctcgccagaacttcccacgaatacgcgaacaggaacaccaacgccaatgccgtcatgaaccattccgtcgcacgacgccatttgttcaatgtcatacccttcctttcttcccgactgccatcatacgggtctccccgcacgcgcgaccgtcagcttttgatgggcatgcgattgtcgagcgactgaccgttggcgtagcagcggacgttgcctaatgcaatggagatgatactgcgttcggtgatctcaagatggttgcctcccgccacatgtggggtgatgaggcatttcggctcgcaccacagcggtgagtcggccggcagcggttccggttcggtcacatcgagcgcggcgccacggattcgtccttccgcgagcgcgtcggcaagcgcctgactttcaatggcgtcgccgcggcccgcgttgatgatgatggcgtcaggtttgagagatgcgatacgttccgcattgagcaggtggtacgttgtcggagtggatggtacgcacatggcgatcacatcggcgtattgcaggacgtcgtcgagggaatcgaaaccgaccatatgatcgatgcccggcgcttcgacggcgggattacggcgaatgccgatggttgtcattccgacgtttttgcagagtcgtgcgaagtgtgatccgatgtcgccggttccgatgacgagcgccgtttttccgttggggctgatggcgcggcccgcgtcttgccacatggcgttcgggttgcttgccgcgtagatgtgcaggttcttcatgatggcccacatcatggcgaacatgtgttcggagacgctttgcccgtaggctccggtggcattggtgagcatggatccgggctgcaggatgccgggtcgctggtatttgtcgacgccggcgctccaagtttgaagccattcgagtttggggcattgcgcgcattcctcgggcgcgatgttgccgatgaccgcggtggctttggctttgagttcctccggtactgcggcggtccagctcatgcttccccgttgggtcgaatcgccgacgaattcctgtggtatgtctttcgcagcacgtatgaattgcgcacgttcggattcggtcaacggcaggcagttgacgatcaatttgcggtcgttccatattcccatgcgttttaccctatgacaatcgtcggatatagggcttcacgttgggttctgggtcagacgccgagttcgtcggtgtcaaggatgatggtgaccggaccgtcgttggcgagccgcacgcgcatgtgggagccgaatcgtccttcttttacttcgagtccttgcgcgcgcagggcgtcgttgaatccgtgccatgtctgttcggcgtgcgcgggcgctccggctttcacgaagcttgggcggttgcctttgcgcacgtccgcgtatagcgtgaattgggagatggacagcacactgccgttcacgtcgtggatggaacggttcattttgccgttctcgtcttcgaagacgcgtaggttggcgattttgcgggcgagccagtcgatttgctccgctccgtccgtgtcttccactcctacgagcagcacatagccgatgcctatatgctgtggttcgaatgtggtgtcgacttctccgcttgtctcgtcgaccacgtcgacggatccttcgctgaccttctgcaatacgatgcgcatagtccgtcccgttcttttcagccggcgtagtcgacgatggcttgcgtgacctgtttcaggtagtcgagcgacgtctgccagtcgtccggcacttcgatggaatggttggcaccagcgtacgtgcgcacatggtcggtgagcagatgcgctttggcgtcatcgtagtatgggtcggcgtcacccgcgcagattagcggcatcgggctgccggcagttcccggcagcggcgcgggaatgaccgacttgtgcctgtcgaatggcggcggattgagcaccggggtgagcaacaccacgcgcaatcctagctttgcggaatgcggatatgagagtgtggagagcgatttggtgacgaccagcaaatgcggctcctcacccgattcggcagcatgttcgagcgccgccttgcgccatccgtcgaccacgcgttccatgcaggcgatcatttccggaaactcgacgctttccgtcagtttcaggtcgagccggtccacgaaccatccgttggccgcaagcgcctgcgctgcccagtacagcagcggtcggtctacggtgtatccaatgcccggcatgatgagcacgtgattgccggtttcggtgttcttcacacggttcttaccccatggggtgaccgctggtgtgacgttcttcgttgttagttgcgtgccgttcttacccatgctgtgtttgattcgccttttcgtgtgttccgtccgtcttgaccggtcgttgcggccggcgtcatttcccgtattgcatgctaggcggcgccggctacaatcgtttccgtcagttcaccatgcattggttgttgtggattttcgcggccatgtcgttcgtttcggcgtcgtagatgttccagctaggttttctcatcccgtatttcatggcggcctcttttcggatgactacgttcattgtatgaggcattgaacgcacagcagtcgaaacggtcaaaacatcagccgagcagctcatacacattgcgcatggcgagcagcccgtccgtcatccaccggtaggcttccgtcatgtcaccggagaaatccacgccacggcgcacccaaaggtgtcggttcttcttgtcggcatccggttcgtcccaaatcacctcgccgagatccgacagtatccgttcgatggaatccttcatgccataaagcttcgaatattggaatgcgtcggtgaaatacagatcgaccgcaatatagccgcctcgaatattcaacgtcccatctgggtggcagatttccgagcccacgccgaaacttgttcatgtgtcgctgtttgtcttgcggccggatggatcgccatacacgtcgacaaaatcagcccgtgttgcggcatattcgtacaacccattccagaagctgcgccgcggcgagatattactgctgatttaccgcaattcgttcaaagttctgccgtccgcgactttccacactgtccacccgttgacctgcttgtcctcgccggtttcgagcattctggcacggcgaaatgcgccggatggactgtcgaatatctcgccgttggccaagcggatgcgatggtctttggttacggtagccgtggcggttacgccagcgtatcggctttccagcacatctccggccgcgaggactccgcgtttgcacaaatcagcgaaatcaacggcattctgttcgcgttccccttggctcgcgttccgattgcgcagagtctgcataacctcattccccgctgtggggcgtgcccacacctgcaatgcgagatcggcaagtcgggtgcctcgctgcgcgatcgcctgttcgttccattgtgaagcatcgtgcagttccgtggaaatggataggtattcgctatcgtatccgccgaccgcacggttcttcttctgttcgaacgttccgtcggaaagctccgaattgtatgcggtcagtgtcagattacccagactgttcgccaatagcgggaatcggtcgaggtttgcgagcatattgcaccattcggcgtgcgccatggcgttctgcggcatgatgtgttcgatggtgtattcgctgaaggaccgcggatccttggggtggttgtggttttccattccggcaagcagatacttgcatcgccaggccggccggtacaggttctcgccgagcaacgcctgtctgaatttactgtccgtaggcatgcgtgtggctttggcggtctcggtgatgagtagtgcggcgaaggtttcggccaaatcattttcagccgaatcaagtctgacgatcagcgacggaacgagcttgttcaatccgttgctggataccgagcagatcattctgcggaacaggtacgattcaagatccgcaagcatgtgcagcagtccatcacaacttacgcgatcacgcttccatgccgcgaacatgtacataaccaacgggtccgtaaccgtgctgctcagtttttgaattgattcgagacggcggtccacgttcatatcgccgctgccagcggcggcaacgcctttgatagcggcatagtatttggcgtattccagcatgttcgccagaagattacgcgtgcgttccatgcgcggcaaggaactgtcggccgcgaaacgtttgaattccgcgtacatgacgtggcctttgagcacgggctttttcaatgtaacgaccatccagtcgtgcaggaacacatcgaatgagaggttgccgagcacacgttccatgggcagccaatagtcttcgtataaggttttctgctcggccatggagcaacccatgagcatgtagttgcgtaccaggtcggaagtctccagatcaagcccggtggaattcattgattcgaataccagttgcggttcgtcacgatcttggtccaaggtgacagacacgacttcgagacgctgcagaccgttccacaccacgtttgcatcatcgattgcggcggccagcgaacggaacaaatcaagatttgcttccagccgggaacccgtattggcatggttcggccgatcaggggcgaccacatggtcgcacatgccgtgcagcacttccctatcgtcgccggaaagcgtcagcttgtagcggccttcgccggttgcatacttgtcgacaagatagccacggtcgatgagcatgtctgccgagaatcgcaggttttcagggcgctctcgagcatattcggccagtgcgataagcagcagggttaccgaggtgaggcgctgctggccgtcgatgagcagacaccggctgacaccatccgggccgatgccgccttcctgcatccatacgaccgacccggtgaaatgcattctctcaggatgcctgccagccgttacaatgtcggcccacaattgccggcactgcgccttgccccatgagtatctgcgctgatacaccggaaccacgaaccgaagcgaaccggtaaataaatccagcaggattttcttgccagcgtccatggtgctcctcttcccttacctcacatgcgccgagacgccagtcagcagcacaccctttttggcacgtgtcatagccacataaatgagacttcgttcctccctgtagatatcattcaacgcagccggatcggcaccggcagattgcagcgcaggcttcggcgggcatacaccatcgttcacgtcgactaccaccacatagtcgaattccagacctttgactcgatgcatggtggcgatgcgaattccttgcctttgcctgttttctgcatccctaccaagccggtacacgccatacggcaagccgtcatcaagcgtcttataccactggtcgatgcagtagcgacttcttgctaccacacacacattacgcggatccacacgcccgccgtcggactcatcgctggccgcgtcttccgccgtgccgcacaatccataaatccattccctaacggcatccatctcatctgactgggatgcaaaccgccgcgcttcgggaacgggaccgctcatcaacgatctgctatcgccggtcggactctcccctccgtccaggtcatcgaacgttgtggccggcgaagcatcttcgataccatgaacagccgcaaacactgaatccgcgacatcggcgccggaactacggaaaatggagtcggctgcgctacgaatctgttcggtggtgcgatagttgatccgcaatttgcgggcacgcccctggattcggatgccgcatttcgataacaccgcgatatgcccgtagatgcgctgctgtgcatcgccgacgatgaagatatcatcgtctccctcatccaccagagcacgaatcacacggtatgccggcgtggagaagtcctgcccttcatcgaccaccacatgcgcatatttccttggcatatcaccctgcgtgagcaacgacacgacgttctgcatggccgtgtccacatcgtacgcgtcgttcgcctgcatgatgcgccgatacgtttccacgaccttccagacggcgagcttctgcgctcggtttagtttcgtgccgcgccccttgcgtagtacgcgcatgtaatcggctgcattccgcacctgctgcggcacaatcacctggctgagctcgcttttgaagaaggaaaccgtgagtttcgaatcgttcacgccgatggacgtgatggctttacgccacgcagcgtcaagatcattgccatggtcggggctgccgtcataccaaatctcaccggaatagccatgccccgtcagcagatcttttacgagcttgtcgagattgaccacgtcgatggtattgaattcgtctggcgtgcagatgagtttcaggttcgatgcaatatcggtggcaagattacgcgagtatgtggtgaacagcactttctgacggctaccgcttctcagcagtcttgcagcgagacgtttcgcgcgatgcatggccaccacggtctttcccgtaccggcaccgccgagcaggcggaacggaccatggtaatcatgttccacataaagacgctgcgatggatgcaggaacacacgccactgttccagcggcgcatccagaatacgtttgagatccgcttctccctgcacgaccacgaaagactgctgcgacgcatagcttgacagggcggcacggaagtcctccggatcggcctcttcaccagattcgatggacgaggcagacatctgctgctccagccccagcctgtcgctggtcttgccttcggtttcatcgagcagtccgaagacctcggacttgggaagtccttcagcaacgaaggtaaggtacgtgaaagcatcctttgggagcctggccccccaccgttcaaacgcttcccacgtctttctcgtgcacatgactggcacatacatgtcaggtacgccgaaccggcgcatgtcattatctgtcaatgcccgataagtgtctggaagcggaccggtatgaggttcgggagcttgctgtggcatctgcggcgtcttgtccgtcacagctgaagttgcaatagctgaagctattccgtgattcgtgccggtatggtcttccgtgggctggggaacagattccgacgcagcggaatctgattggggcgcgtttgcggcaacgcttccccatccaactttgttttgggaatcctcatgcatcgctgcgtcgatttcctcttgaggagccatatcgtacagctggatggccctcgtattcgggttgacgctgattcgctttgtttccgcccatttgtaagcgtcatcgtggtctccaacgtacagcaaaacgtacacgttgctgcttttctggaaagcgatgatggcgcgatatcgctggtcgatgcgcgcggaatacagtttttcgtccgccgcattggcgattcgttccagattgattccggatgatcgaggattcgcctggaattttgtcagaaacgtcgtggcatgtttctgcgctttcttaggcagctcgagcaggctgcgcatgagatcgctgccgagcgcgaccacgggtttgttcatcgtacgtatatctgccatcagcgttccatgccttccgtcagtgaagcgaacaccttgtcaaggtcatcgttgttttccgtaatgatagtccagccgcgcttgacgaattcgtcggcgttctctcggtcggattgcaagtcgtaggacgggaaaaacacgatcttcccatcctcccatgcgagctctgcctgcgcaatgatttcctcgttctcgtccagcagctcatatccgagtgcatccggtgccggtatgtcagactcaataaaccgtttgacggcctccttggtttcatccgcgcaatacacgtaggtcggatccgccagaatatcgttccattcggaatcattgtctttctgcagatcaggagcgttccgcaggccgttgcgaagcggctcgtacatggattcgtcacgtagcgcagcatcaccgatagcatggaagtattccgagaattgcatcacgttcgcaaaatgccagaaggctgcccactgcgttttgaacgcctctgcctcgttctcgtccaaagcatccaacggattataatcatcgttctttgctttcgcggcatcacgttgaatgtccgagaacaccatgccgacgtggggttcggtggtccgcatatcctctccaatgcacaaaccggattggaatttcagtctcgtgcagttcgaaggattccaggacgagcaaatcatgaatgtcgattcgttctcgccgtgcaacgcttcattccgatgcagcatatccacggcctgaggttcaacgttcttgtttcgcggattcagagcatagctcattgccagcgcttggatggcgaatatccgttcggcatccggttccgcgagataatattccagcatggccattgccgaaacttcgctggggttgaattcgtcagtcctcttgccaatcgtgctcttgtaagccaccggagacggcatggacttgggtgccagcatcggatcggcgagctgcgccacatccttgccctgcacatatccgatcacatcgtcataatccaaggaccatatgcgatagcctgcctgacgaagcgcttccctcttcagggaatcctgggcgacgatgcctgcatggtattgcaggccatcggtgaagatggcaaccggcttccttccgtcatgctcaaccacgtcaccagattcatcgatattgctgaccgtcagcacgaaatcaggcttgcagggaatcgcgaccccatcggccggccccaacgcgacttgtggctcgacgctccacacgcttccgttcacggtgatggaatatccaggtttgctattgatgaattcgtccttgacgatggcacgacgtcccttggcatcgtcggattccgcgaagggatgggcatgcatgcaccggagagcttcgatgaactgctgttcgagtccactgtcgaacagtttgttcgtgttgatcttcgaaacagttgtcacacgactgcgtttgttggccaggtcgaggatgcccgtgagcatcgccagcgcggtcttacgggaaataagtttcaggtcctggctttgtctgtatgcatacaggcatctgtagcacccgtcgccgccgttctttgcacattcgcaatgctccatgacttcctttgccctggaaaacacctcgaacatcgtatccggatcggacagctgcttaagatagccagttcctccgggcactgtgtcatatagagcaagataggttttgcgcagtccggagttatccggcaacggctcattcatgagtgtcgcctgtagatgttccacgttgccgaagcgttcacgcagcccaagcatcactgcggcggtcaatgactccgcagcaccgtccgcaccttgggcatcggcaagccctggcacgagcatacgcagcacttccgatttaacctcacggtataggaacaggcacgtgccgttccgctccgattgctccaactgctgttcctgcgccttcttgcgttccggacagaagtaggcgtgccgtgattcgcgctcgccgagcaacgcgccgcatttcaggcacacgttgaaaccgttacgtatctccttgctaccggcgatttccaccgaggctcccctatcagaaacctgtccgaagttgatttcacggactgtgccctgcggcgtgtagtcgaatccgaagttcgtgattcccttgaactgccatcccgattggatgtctgccggatcaatgtccaccatcgtattcttcaggaactgggtcttgggtctgctgtcggaggtgtcctcaatcaggctttcgctgtaggtctcatcggatatgacggtgtcgatgcgcagcatcggccttttctggccgttatcggcccactgcattgacccacaggagggacagctggcgaggttctcggtgctggaggcgggttccgcgtgcgaacagttcggacataggcgccacattgccagttcgtcgtcggcaccgcctttcgaacatagcacgcggctgattttgtatttgcgtccgcccgcgaagaacgtgtttcccggcgccagttccgtgatggccgtggccgccgggcgcacgaaatcacgcgtggccttccccctgcgtttcgtcttgtcctgcgcggcaggctcgattccgtgtgccgcatcggacggttccttgtcctctttgaggatggtgtggagggtcacaccggtttccgggaacgcataattgggcaggataccttcgtcggaaaggtagttgaacgtgttggtgttgagaatgcttgtgacgatgcggccaagattgtgaatctcatcttcgcattcgcgctgctgctcttcgaacgatgagtcggagggcttcttcttgagctcgtcgagcagctgcctcgcagcgctcttctgcgattccagcgttctgacggtatcgttggttttttggaacacatcgtagacgcgtctggccatggtgctgccatcttccgtaccgcgtacgaatccgtcgagctgcgttcggagttcctcggagaatgagaacattcttccgaatccgtcgagcagttcgccggaatgttggcctgtccagttcaggaaattcaccgggaacccgctggagccgctgccgttgacattatccaaacagtttttcaatttgtcgggtaccacatcggccggttcgctgccggcatccagcatggcatgcacccaacgatccaatgcgtaggcggtgagctgacgctccaacactgcggtcgcgtcgaggaagatgtgcggcgggttcaccgcgcctccaagcatatctttcggacgctggtagaagtacgtgtcgtgttccttggtattggccaccgccagcaccaaggagttgccgtcacgtcgccctgcacgaccggcacgttggatgtactgggcttgggtaggcggaattgacgagagaatcactgtggagaggtctccgatatcgatgcccatctccagggtcggcgtacaggcgagcacgttcacgtcgccgggcttgcggttcttgcgcttgaattcctcttcgaccttggcacggtcatcgccattgagcagccccgtgtgttcggcagcgtggatgcgatcggctggctccccgcagtacagcttgccatagtagcgcaattccagggcttcggcttcgggagtgccggagaccagtctgcccgggcatttgcggatacggcaacgtgctccgttccacgcgtcaaggttctgcgtagcgcacgaatagctccgtccacacgtgtcgcagatcaactgcgttaccttgccactgaccatgcagccggactcgttgagcccgtacacggtgcgttccattttcatgcttggataacgttgctgcgtgatgaatcctgctgctatgcactcttcgagcacgattcccaacagctcgtggtggatgtcgccttcaagggcgccgtcggtgaggtaccggtcgacgatctgacggtatgccggcgaattcagggtattgaaaacgcctttgcgcactggctccttgtccgacaggaaatagggcataccatccgcgtacatgccgggcatccatttgatgttcgtgttggaaagcaggaacttgttgccgtcgttttgcaggaactggtcataggtcacgtcgaagaacgcgcctttcgtgcgcagctggtcgaggaacgccataatcagtcggagccagtcagtctccatgatggaattctcgtgcaatccaatctcgttatgacaacgttcggcaacggtctgtgccacacgtttcaggagaatctggtcgaatgctattgcggcgcagccggatttctccaacgtacgtccggtacgggagcgcatgccgaattccagcagcgattccagtcggagtctgcgctcgatccaatcgagcagctgacgccggccgggtcctgcgggattgccttgcaatacggcttcgtattcgcgcatccatgtcatgttcggcgcgatgaatcgcacgatgtattcgttgtcgtccggatagcggcgatggtagtagtcgttctggctattgagatattcggcgagggaaacgccgtccttgtgttcctcgcgcatgtagtccatggcggagttgcgcagggcgaatcgccaagtgcgggagttgaacacgctggctcggtaggatgcatcctgcacactgtcggagaacacgatggccttgctgtcgtcgttgaaggagtctccggaaagttgggtaagcatcacactgacttgcgtggtggttctcacgccgaccatggcgatgtcctgttcgctgccgcagaacggacaccgatagtgcttgcggttgccggatacaagctccatacccctagcgaccatgggtatgcgctgctctccacaggccgggcattcatgttccgtggattcgaaacgttctacggcctgttccttcatgcatgcattgcagaaccagaccatggctccattgtcggcatgcgggtcaagaacataatccatggtgcagggttgcaaggtcaccaacgcattgtcggcatggtaggcgaaatactcgttgtagaacgttcgtgggtcactcatgctgatgccgccgtctttgccggcaagtccaatccatgcggttcctccgcaatcacggcagttaatcaccggcatgcgggtcttgaggtcgtctttggacagttcgacgaccggacggtagtcgatgctcccctcctgcgaggtgatgttggcgaccacgcggccgagttccttgacccatagctgcacctgcacgttcaggaacggacgtgtgtggccttccgaaccggtgcgcgcgtgggagacaagcgctatcagcgcgtccacacaggccttctgctgacgcggatgcaaggcgttgaaccttgcatccatgatggcgagcctatccaacagtttgtgatcgatttgctgaggttcgtcgcagataagcgaggacaagctggccaggaaccttgaatggcggagggattcggcgagccggatgcgtgccttgtctgcggagaccggctctgtgggggcgtcgtcaagccacgcttgggccgcataggcaaggtatttatcggggtcgacgtcctcttcgagttcgatgagccgatcggcctgcgcggcagtaggcatggtgtcgtcatagtcgctggtgacgaagaattcgtcaacgcgaagacgatcctcagtcaccacggattccggtgtgaacgtggtgttgaagatttggctggcatactcacagacgtcacgtactgtctcttcggtgcccatggtggccgacgtgccaacgaagcacatatcgtcgctggtggtattcagcctgtcggtgagcctgcgcagcaagcaggccaagtcagtgccctgcgcgccgtcgaaagtgtgcaattcgtccacgacgaagtatttgagcgtgtccggatcgttgctgttccaaatccgggagtctttggggcgcaccagcaggtagtcgagcatcttgtagttggtgagcaggatgtccggcgggttcttgagcagctcatcatgactggtcacgatgttggtggcagtcatggcgtggttatccttgtcgctgctgccttggctcatctggcccacatacatgcccgcggtcacattgttgcgcagctccggactatcgtggatgagttctgccagtcgtttcgcctggtcggtggcgagggcgttcatcggataaacgaggatggccttgatgcccttgcgtccgagcctgcgctgccgataacagtagtcgaggatcgggtacaggaaacattcggtcttgcctgagccggtgccggtggccaccagtgtggattcaccggcggagatgcgtttgaatgcgcgcatctgatgcgcatatggccggtacgaggggtgcaggcacgggaacggaaattccgtatgtttgccgaccacacggaacggcaatttgaccgatacgaacggctcctgggaaagcatgccttcctgatgtgcgagcctgcggatggagccacggaacggcatattggtcatggggaacgtagtctccacgtaatcggcgagtccggactggatatgccgtgcaagcaccatgggaatcatttggcatctccatacttctgcgtgaagaacttccacgcggttttgtaatcctctacgcgatcgcatttgtcgaacggcgccacatattcgatggtccgctcacgtggaccacccggctgggtgtcgtctgtgatggggcgggggaacaccttgcccgcaggcgcgttcttgattttctcgaaattaggacgtttgaaagtcaaatcaccgtaattcttcttggagaagacgatgcggccattcgcgtcataccaggtgtcgtcctcatagccgctcagcacggtgaaggtcagacggtagatgtcgatgagctcgtccaaggtgatgccgagcgccatggatgccaacacatccagctccaccaacgcctgccggcgttcatagtccgtgcgcaatggcgtatgccagttccattcgtccgtcaatgaggtgaatgcatcggcggtaagtcgaggatcatccttcgcccagctcatggacgtgtatgactcctcccagcaggattgccacaggtctgcatacgacttggtcagacagttgagcagcagaccgcggagacgaatttcgggagcaaggttcgtctcagggactggttgcagactcaatgttgtcgcgttgatattcatcttaccgattgaacgaatgaagaaatcatatggcagagcggcctcgaggccgctcatgagcgcgagcaacgcgtagcgctctgggtgcacgccatagcccgctatggcgtgcacccaggctacgcctgggtgaacgcaggacgcttgcatgtcctctcaccggttaatgggaccattcctcggcaacagagcctataaacagcatcgaatcggctggcagcaccgttttcttgattcggatcagccattttttgcacacgcgactcatattccgcggccgtgcatgcctgcgagtatttcacgcgcggcatatagtccgctggaatgtcggtcaagtcaattggatcataatcgctgttgaccttgtagtttctgcgggtggattgcagtaacggattggcaacaccaatgaaaggactggaataaatcagcgctttcgttgaggtcgggaaatgaacaccatccttgatagtgccatccttacgggaattggtttcattccacattggagaataggtgatctcgttagcgtaggttctcagcgatcgaggaatatctgccatctgttccaaagcatgcaatagctctgcggcatggataccgaccatcggggtctgcttccatccatccttctggctatcccccacgagtttggaaaacattaacagttcgcccttggagatggaaatgatacgacccttgtgcccccgcgtattccattcccccagttcgttcttgactccgggaatggtaccaacgccatcggacgcatagcattcatcaatagtcttgggatcgtaaagattccagatggaatcaaactgaggaagcttgtcattcgtctccggattccggtacacgttcaaactgaacatcgtctcgtgatgaaccccggagaaaagtttcttttcattgatgaactggaaatggtatcgaagtctgcggtacatctgctcacgcagtacgcctgctctcgtgtcaccatacagttcatcgggatgcacgaatgcactcacaccatcatgtttacgtgtgtaatcccaagcgtttggcaagaagcagcgaaataagttaatccgcccctgcaacagcgggtaattacctgttgaaccatagaatgccaaagcaccggcaatattcacatactcccgaagatacatagttcgtatacgtgcgttctttagaagttcacccatacgcttactcaaatcggaagccgtaagcttatgaatcgcaaaataaggattcgcatcggaaacggcatccgtctcactccactgcacgttcacccacggcggattaccaaccatgaagtcgaagccgccgtctttgaacacgtcggcgaattcgagctcccagtggaagaaccgctgtttcttggcgatttccttcaccagtcgaagcctttgcgctggttccccatcacctttgcacagctcatcgagatccacagcatggtcatacatgtagtcgcgttcatgactatcgtcaatggtgtccataagcgtgggctgatcgtcatccatcgacatcagcgtgaatccctcttcctgcagaacctcgccggtaagaatcagcgacatttccgtgaggtactgcgatcttgtgggaagcaggtccgccttgtcgatgggccagaaccacagcgagcaccaatagtccatggcgagtttcaaacgagcgtattcactggcgttctcggcctttccgaatggtaggcaatgcggagcatctcatccttttcacggatggtgaggttgttgccgcggaagtattcgctttcgatgccgagcgagccctgcccatgcttctgctggttttccaaagtcttcgcggtctttttggaaacattcgcatcgaaaccgtaaatgatcagatcgtcttgggtcgccttctccaattgcctgcgcgccttgatctgcccacgccacaattcgtcgatggtcttcgacaacgacctcatcaggccaatctccgtctgggaataaggcttcttggcgaaattcttcttccaagccttgatggtttccagatgttcggattcgatgcttttgacggtcttgtcgtcgtacttgcacatgtccggatccccggtcaggaactggtagacgcgcttgacggacgacgagctccggtcgaatccgatgcgcttgggctcgacctcataccagtgacggttcttggtcgtgctggccagatccgactccaagtatccgacgcggcggccgccaatcagcgaattgccgcattgcagctgcgtgccgaaccatggcacgaaggatccttcgcagatggtgttgagccatagtgacacttcccccaattccactgcaacggggttcaggtcgatgccataaatgttgtggtcggcgatgtacatcttgaccttctgcagttcagcctgcctgcgttccgcaggaatcgccgccttctgtccttcctcggcaacccgctccttctccctgcggttcagatacatagtggccaactggttgatggtctcgttcaggaaggtcgcagagcccatagccggctcgcagatcttcaggctcagaatatcggtggcttgatggatacgtggctcaatctccttgagcgcgtacttcaccaggcattgcgcaagactgtccggcgtatagaaggaggccgacgtttcacgttcccggcctgcaagccggtagatgaatgtgcccggctcgtaggtgcgtagctcgccggcatgcgggcttttgtccgggtaacggacgcgttcactctccgaataattgtcgagttcgcgttccggcacaaagtagccgactttcaaaggatcgtaggaatccttggcgcgtttgacctcgtagagcttctccttggcgataaaaccacggtaggacagcaatgcctcgtacacggcacccatctggctgatgcccagggccgcataggagatgcgctgcctgcgtttgactcccttaccagtcttggtgacgctcatcaggtctatgatgcgcagcattacgctgtcgcggagtgcagcatgttcaatcagcacggtccgctccggatcgaaaatgtgcgccttgagcggcggaaccatgaacaccgcattgatggcttcctcgccaaccagccccttgaaatcctcatccgccttcgggtaaccgttgaacaccagatcgtcgagtcggcgcaatgtgtccgctagataggtggaatcgccagcctcatccatgcgaccacgcatctgttctgcaatatctcgcagactatccagcgaatagccggtacggtagatgtcggatttcatcggcgcgtagccgagcgacggcttcgcctcgatgaacaggaggaacaggagacgatacatgtaccgcaacgcctgcacggtcaattcgcccgcatcgatttcgtcgatgctccgtcccttgttgcaaatccagtcgtggatgacctcattgcctaggatttccacgcattcgcgcaatgcggaacgcaagttgtcagacacctcaaccgcgttcttcgcagacgtgtcatcaaacgtgtcaagcagactgtcacctttgttcgggcagagactatcgcgacgcaacagcacagccatcgccgtatacacatgatcctgatggcggctgaagatctcgtccaggtcgaacagcatgcatttcttgtcattccatttacggcggtcgatcaacgctatctgatgcaaccccatgagaagaatccaccgtgccggctcgtcgaaatcggcgagcagcatgcgtgcatattcctcacaggaggtgccgtccttgccagagccgtcttcgatggggttttccagaacgcctgcctccgcactatcggacaggctcaccagaacttgcaagcgcggagccccatcggaatcattgacctgatagtagacaggaacagacttccctgaaatccggtcaagcaatccctcgtctttggcttgattcccctcctgcgtatagccgagtgcgacgagcatgccgtcgatgaaattccgtacccgttcagctggaaacagatcgttctcgttgttgttgatgacttcggtgaacgactggcgcatgtccttcagcagtcgcgctgggcgtttctcaggaggaagctgtttccaaggtgcggaggcattcttcacttcatccggaaaatattccttcatgtagtacggcgtgtagaagtcgttgaccgcctcgatgcctgggaatgtctcgttcagttccttcgccatggtctccccctctattccttacctacgaatgcggccgcaatgcggatcactggttcgccggaggcgtccaatgtgtcctgaacccagtcggcatattgttcgagcatccgatcaacctgttttgtgttttccttggtgtttttgccttgggattgcaacagtaccttgcgtgcatgggaccaatgctcgatgcggtccatttgccgagtcacttcttcatctgcctgcgcacgatattgttcaccgcaatcgctgagcatgctcttgccgcgcgataccgcatcctccaacagcagttgtgccgcatctatctgttcggagctggccgcggaatcctctcgattcacataacgacgttcagtggttcccggaatcaagttcccacgatatccggtgatacgccacacttcctcaagtggcagtatgcccatgcattcgccatcgagataccgtacaccgaaccattcatcgatcaccggggatgcgtgcttgttggcgaccatgccgttcatcagcataatcgtctcatccgcatgcaggtttccgttggtcacgccgataatcggggcctcgtcacgttggtacagcagtgaggaagccttcaacccgacccattccgtgattggattcaattcccacaggtattggacccgactccatgactcgtcgttgatacgggccagcagaccgttggcttggtcttcgcagtatttcgcgtcatcactccattcagcgatgttatctcgcaacacctgtgtgttcggcacacgtctgcgcagccacgcgcgcaacgggctatccccttggaactccaccgcgaatccatgagcatcacgcaactgacgtttcgatttaagaccagccgactgccggaactcctcgcaggagagcccctcatccacatactcgtaatccgacatcagcgtagaggaatcgactatgccgccatcgtcggcgctcccagccgtgctctcccctgcggactcgttttcctcagtgctcgtagtatcggaaccatccggcgtagtgaggttgaaaaaactcaatggatcgaaaacatcgtcatccgccacagtctcaacgtctccggaacgttcgtccgaatgatcgatgtcctcatcaggaatacaaagtctggctgcgaaattctccgctgattcgccggattcaatcgcttcgcgggtgaaattttcctcctgatcaacgtcgaatttgcccatgagcaaggacggatcgccgatatccttacgtgcctggtcttccttctgctgcaggatctcgagaatatgcgcgtcaccttgaatctttgcgttacgcgagttaatcatcatgaaacgaatatcaggctgtttacgctgcccataacggtcgatgcgtccgttacgctgctggaataccatcaacgaccatggagtgtcgaaatggatgagtctgtggctcagatagtgcaggttcagaccttcagaggccacgtcggaggccacgagaatacgtacagacgaggacttcgtaccgaaatcctcgacgattttctgctgttccacatcgctcatgcctccatccatggagacgatagccttcttcggtagtttgagatcctgccgcaagtgctcctcgagatagttcttcgtctcgatgcgttccgtgaaaatcacgatacggtcgtcggcgtcttcaccgttatgccaaccgtaatcggcactgcgcagaagctgcagcagtctctggtatcgggaaaactgcatcggaccgatcttctccaaggcagccttgagcccttcaagcctgtcaatgtctccggtctgatcggacgcatcttttttagcaagccgcttcactcgctcgttgatggttttgatgcacgctgccggcgatgaaaacagactcttctcaagcatcgtcttgaacaggaaggaattgcttctcttctgatgcatatccatgacgagtttcatatcggtcaagtaatcgaacgcctcttcctcggctgtggtggccatgcatttctcctgcgtcaccttgcgctccgggaagctgcctgacacctcggccatcacgtccttcttgaaacggcggacgtacaggtgttcgacatccttcttgtcgtaccgctccggatcgggcagagtggttgggtcgagcatgttcatcaacgaagcgaaactacgagcgcggccgtcatgaggcgtggcggacagcatgatcaacgtatcggaacgggaggcaaggcgcttggcgagcttggcgcgctgtgcactacggccgttgacggcacggtcggcgacattctgagcctcgtcgatcacgatgatgtcccaatacgaggcatcgagtgccgcgccatattggatgtcccgtttcaacgtatcaatggagatgatcaccttgtcgtaataggagaacgggttggcgttcgcaggaatctcggaacgaatctgctggatgcgcgaggagtccagactaatcagcgggatggtgaaccgttcccacatctccttctggaactggaccatcatgcttttcgccgttaccacgagaatacggcggcccttgcggcgcttgatgagttccgacatcaggatgccagcctccaaggtcttgccaagaccgacagcgtcggcgatgagaattcgctggcgcggttgggcgagcgccttcttcgccggaacgagctggtacggcagggagtccatggcagccttgttgccgacatgaatcctcgcatcggtcggcgcagtggcacgtaacagactctcgatgaacagatgcgatttcgcagctcttgccgaggtgtcgggaatgaaacgcgtcttcaccggatcgacaggtgtaattgtgtccaaatcatcaaggaacgtggccgtcatgtcccgcaccagagcggagataccggtgcatgaaacggcatggttgccaagactgttcggctcgactttatcgacaagccattcttggccgcggatcagcactcttatgccgggagaaagcagttctcgttccgaatgtgcgccatgcctcattgccgtgtgctccccatatgctctcaatcccaatgttttcgtatatattgtatgtcattaggggttgaaaccttctgctttcccgcatgaatgttagatacacgtatgttttcgcgcattgatacttggaatcatctacatctttcgattatcacttcccgaatccttacctccccatcgcagcttaatgcaacaaatgcggatgccgaacaaatctaccgacagaagagagtaaatcatttaatataactacactggtacaacatgaccgagaagagcaatgcagcagctgaaagtgaaataccagagctcaagcctctatacccccaatatgacgaatcgagccactcaccctatgtgaagaggcttgaaaaggcgttgcagggcgaggatacgaagatacacaacatagctctatcaggcgtctacggttccggaaaaagcagcattcttgagaaagtcgttaaagaccttgaggaagagcgccctcatacaactaggacaatctcactggcgcctttagctgcacagcttaaggaacaggatgataagaaaaacgattccgtctcggataaggataagtccacttcgaaagaaccatccggcgctcccccaaagccttccaacaattcatccataaccaatctcattcaaaaagagatcattaagcaacttctatatggaacagaccccgaaaagattccggcatcacatttccataagatgaacgaaatcggattaggaaagcagatactttcctctcttgctttcggcatgctgttactgttcattcttaatatctatcaatggccttacagctatattcaaaaaccgttgacatggctaccaatcccaacaagcattaccaaaattcttgctgaaatcgtcataatttgcctgctatcaatagcaacgttcgcactatttcattatttcggaacccgcatccatctagccaaaatagatgtcggaacagcaggcattaccctgggagagaactcggactcttatttcgatcagtatcttgatgagatcatatatatctttgaaaagacaggcattcgaactgtattttttgaagatcttgaccgttttcaagatgctcaaatctttgattcactacgcgagctgaatcagatcctcaataatgatccaaagctgcaacacacagaatcgcaacacaaagaaaagaattctcagtccagtacacctatacagttcatatacgctattcatgacgcgatattcagcaatcaatatgtttcggctgatgaacaggtgagcaataaagaatctctggctcattccttctctcgcgcgaagttctttgacctcatcattccagtggtgccatttgtttcggcaagcaattcatgccaaattgcatcggaaacattggaagatgttcttgatgcgaatgaccctcaaatgatcaatcttcttgagctcgttgcagatgcagttcccgataaacgcacttggatcaatattcgcaatgagttcattgtttataaagagcagctgcttaacccgaaaaggaccaatcttggactgtcccctgtcaagatgctcgcaatccttatatacaagaactgttaccttgatgatgccataaagttacagaacggccggagcaggcttgaccacatctataaggaaataagagagataatacaggaagatatttccgcattagattacaaaaacaaaaatctaaaatataaaatcaacgaaatctcaaatggcagagccgctgaagaatacgctagcgagcttcgaacggaccttatctatctgcttgccgatttgaataatcagcaagcagatagatgccaatcaattgatataaatattccaaacaacagtcaaaatacatatgctgccggcgatccgaaactctgggacgacatttctcgctgtaaagaaaccaatcgaatcaacattcgaatttcttttcacaatagttactatgataatccatcatttgatttcagctccacaataaagacttttaaaaggatcatgggtaaatcactagacaccgactggcgaaaagataaagaaaaaaatcttatagatgagaagaataatacatcactgacgattgaaaaacttcggtcaggagactgggaatttattacccactatgaagcggcgaaaccatgtcacaatcaagaactttatgctttactaggtggagacaattctctgctgaaccgactcatctcacacggatggatcggccaggactatatgctctattccacaatatatacagatgaaggagtaaccaggaacgcactgaattttattcttcatcatatcgatggcaacaatcctgactatcaattcaaacttgacaacaaggacactaaagacgtcctccgtcgaatcaaaaatcgagacaaaacgattttcagccagcggagaatactgaacattgatctgctgcattacatgctgtcgcagaataaagattctgaagtagtccaggacactaatcaaatcatcgagatgctatccccattggacaacgagacctctgaattcgtttcagcatatctggaccgtcttgacgataaagctaactcattgctcgacaagatggcaagccgcagccaaaagttacttagcttcctagctcaacgaggaacaacaggcactgacatgctttgccagcatcttgatgtggcgttccatcatctatcaagagaaatccaatacaccgtagacggtaacctagctgattttcttcagaaccattggcgaagcatctcaatcttcagggattccaatatcgctccggcactcgttgaacctatagtccagattctcaacgatgggaaagtcagaatagactccctctccgagctgggttataaggattcaagttctggattgcgatacccctgcgtggaacagaacctatacgtattttcaagaggtaatcttgaaaccgcgttggacaccataagccaatcagataataatcaggatggttcatatagcgtttgcaatagacttcctgcgctcaacatgattatgcatatcagcagaacagtgtatgcgaatgcgcttgggcaccttgagaaatattttgatcttctgaccaaagatgaatatgcattggattgttcttctaatcagaatatcgccgatgacctgctccacatccttgacgatattcgtcaacaaaccgatgaagaagatacaaaaaagcttatccatacactgttgaataaatgttcgtcagctgcccgtcttcccctttttgatgatcattttgaggattataccgatgcactcatggaatgcgatgcagttcatttcactccgatgaacctacagtgggctttcgcccatgacgcgctcaccgaacatgaatcctcaatgaccacgtggatccaaaaacatgactctttcgaacagggcgatacagacgagaaacttgataaagaaaaactcgctgaagatacaatcaatcttccacccaccattctgaatagcgataggaaaatacaccttctccaagaactcgaactcgaaggtcctatccccatctcatccatcgagccggataagcaagaccttgcacattgccctgagatatatgcccaactcctcaagaatgggctcgttgtcgatacggcagaatccttcaaggccctggatggactgccatggcccgtgcgagaagcttggatcaaggaatcgcaggaattcgctaattatcttggtgatgcggatcttcaccccaatgaagcgtgctacatcgtctgcaatgaggattcacgattaaagaaatccgcggaagccattatgaacaatttccgcgactacacggaaggagccgacgagccaaatctcctcaatgcatcaactaccctaatcaaaaagggaaaggccatcgacagaggaacacttcagaagcttgccgaatatgacgatggattagtcaataccctgctcctttttgatgccgggcttgagcctaaatcggcaatcgtcatgtttgcctatgctcttgaatatgtgactgcccaggatcaaccagaaaatgagattgttaaaaacatgaaacaatttttccaaaaagtcggaggtgactatctgaaattcactgatcctaatagcaagtgcatcatccttccaaacactgccgaaaatcagcagattattaaaactctatgcaattggaagtctcaactcataccgcagatcgaagaaatcgatgaggaaaatttaatcaagattagacgagatcaaaagctctggaacggattcttcaagcacgataagtaaccttgcagccaatacttgagtccattaaccaattagactacaagtaatctacttgagcgatggggctgggagcagcagacaattcagctgccgctcccagccccgcctttttcagtcgcctatctcaatcgcataagtcgcgacttcatctttcactgcaaaggaatcatctacgccactgtttcgctttttcatgaagttcctgctcatcaaaagcctcaccgcagcaatctgccagacgccgaagcacatcaatctcttggcttgtaatcttgccatcgaccgctgccataacagtacatgcacgataaatcggagcagcgtcactaatttgactcagcatgctccagattttggaataatccacttctacagtgttgcgtatttcatctaacgtcttagctgagacacctgactcgctactgatcaaagtcagataatgaaacaatgtatattcagcctcatccggctgtgcaccatttgcagcaataatcatccaagcggcccataataattcatccaagcaatgctccgaagcattcaccatgcgctttgcggattcaatcatcttggcctctttgcgcatgatttcacgggctttatttgccgttaccttcgtcatccaataattcacacccgtagacagcggtatgctcaccaccggaattgaaattttgatgatattgcgctgcaataaatacttgccgataaccggaaggctcttggctgcgacgagtctgggacctgaaaaaatcgcttttaccactggtcggaccacagccgggaccccttttagaacagcattaccggcatcctctccaacctgtatggcaaaagctattctgatcagtttccacaaatcttcaggatcgtccaaatccagtggaacgccatataaaactgcaatatcatatgccaaacgaagctgcagctgagaagcataaactaaatccacaccgaacgcagtaagaccagctggcccagtaacaggggaagcaccaccagctgatcctagggtcgcaataacagctgtggaatacgccgctgcagtcaaagacccctctatccccgcatatttggccgctaattttattcgggcttggacaattgcatcaggaggaaggttgggatattttcccctaaaatagtcagcattcaccttctggacatacttatcaagagagaaggtcagcaacttcgcaaaccattctccatttttgaattcatcaatattgatgcccttgacgaaattcttaatatccgcaatttgattttgaaccgccttacgtgtgtccttgtcacttttcgcttcctcaaacagcgaatcatcggaagtcatagagccaaccctcttcattcgtatttctttgtcttcccatcaaagtgtagcctgttccactttccatccattgaatccgggttagccatgttctccctactctgataagacgcactacgcttaacgcccatggtatctgctcacttacttgttcgatggatgatatgcgaacaatgcgcatttaccataagccatgttttcttcgcgagcgcgagggacttccagcagatagattctgcgttcaagtcaacgaatcaatcaaggccactcgcgcatttgcacgtatttgcacgcacaaatgcgcgcactcagatcttgatcacatacttcgtcattcgtacggcatgttcaatcgccaaggaaaccaacgatgctcccatgaaactccttggcagtaaaacgcacaacgagatattgaatcggggaatacgcaagctgcaatcgcgtcattgtaatccgaatcgcgtcgcaatcgcgtcataatcgcgtcatcaaaatccgaatcccgtcataatcccgtcatgatcgggtagtgtccgaaaacatggctgtaatgaaaagattcctccaacaccatgagccagcagatgccacactgttacggcatgcttcaagttacaattagctcttatgacttcgacggatagaggtgcaacgaaaacactggatgaacttatgcagcatctgtgcgataacggcatcgcgtgttctggcgaattgcaaaaagagaattgaaaaaccgtcctatcgacgtgcggcattcgttttcatgctaggttaacaatttaattgcggtggaagccttcgggcgacacctaggaggagccgatgcgtcgccttctcctttttaatatctccaacccatcggtttttttcagtcatctatctcaatcgcatgaatcgtgacttcgtcgtcttccgaggacttagcttttctgaattccgggcggagttccataccggtctcatcgaactcaccatttagattgcgcacgagcacatcggccaatcgaccactcgagttcttggccatgttctcctcactctgataagacgcactgtgtttaatgcccatggtatctgctccttcattcgttcgatggatgatatgcggcatgttcaaatcgccaaagaatgtacagtcctatccaaggctacgtttacgtcctgaaacgcggtgggtctcttcttctctgtaacaacggtagagcattccttgagacacgctcgaatcgaccaagcgaaccaactatgctatcgtaaccaataacagtagcctccaagcctcttaacaatgctcaaatccgggggctctttttttatcaagtcgcacaaggatacgccatgacgaagcagccaaaaacaatacaggaaatgatgacgcttttagtcgaagaacgcggcttggatatcaccggattctccgaattcagcaccgtcctccttgattgcaactattacagattgtccggctacttccgagcctttcagattgatccttctcatggcaataatcgctttcgaaatggaacgcacattaaggatttcatgattccttatttgatggatgaacagctacgtctactcatccttcgtggaacatcatccttagaacaaacgcttcgggcccattttgcttactaccttgcccaaaatgaaggtgcctactcctacactgatctcagttcatataaaacaatcaaatatcctgacggcaccgaagccagagaagttctaattgagaacattcacaaatggcttgaacgttccagcgaagtatgcattcgccattatcggaataacaacgagcctattcccatatgggcggcggtcgaggcgatgccctttgacactctctcaaaaatgatttcattgcataccaacacaacagctgttgacgaactcaatcagtcgctttctctagggaaaaatcgtcaacgtgctgcgcaaatcattcacagcatggtgtatctacgcaacatttgctcgcaccattgccgtctttggaacagggagattgtccttcctcccccagtccttgatgccacagctgagcgctatggctcatatgcttatgaagaccgctccgtctggaaatctcttattgttctcatggatttaatcgatggaataaaaaagaattccacatattcatccatgcttataaagcaagctgagtcgaatgatgactatttctggggattatgccatcctaaacggtggcattagacacagccacctgaccaatatttgtcagctccccgaatctcattgtcatgagaaagcccagtatcgaaggaaatgataaatatgacacacctcagataatgcggaacatcggattggaggttatggaattgacgaatatcacacgctgcatttcagccagtctgtcctgcagttcagtggtaatgtatcgttttttcaccaagtcgatctcccgaccaaaagtcgatgcaagatcatcacgcaaagcccactcatcaatcattggattggcggtgccgtcaaactgatagatgaaatcgatatccgaatccgcatgtccctcccctcgagccatggaaccgaacaggtacagttcattgacatgatgccgcagcgcgataggacgagcaatctccgctatctgctgaggcgtggtgtcccgcgaaatcgcgtcaagcgcatcctgataacgccgggtaaaagcctgtgtcggatttcccctcaccgcgcgcgagacagcacaggagcggtcacgcccatggattccgccacgcttttctgtgagaaacctaatcgcttgcgcttttcgttaagctcatgtattgttcccataccgatatattagcttacaagctaattaccgtctagagcgtcaaacagggacgaactttatccgtaataatcctcatcgcaagccattggcaaagaccgaggcttctcgctcactttcgaacccatctgatgaacatgcacctgattggcgccccccagatattcgttaaaggatacgacaaaacatacgcggtgtatcagctgcggaaacatcagttttttgttttttcacggaattcctctgattagcctccatcagtatgcatgccccgcaatgcttcagcccctcacagccccacatgcgccgcatgatcgcgggccgtactctcctcatccaaactgatgggcgggaaaccgctcggactattgcgcttcctggtaaatcgatcttgccgcgtcgtgtaattattcactgatatctaccgaataaatcaagccggcccagcccgtcttcactacttgattttcgctacttgtcttatttgtggcatccgaacgccgaaacccgaagtatgagcgttggaattccaacgctcacactcgccataatcgccaaacagtgccacaaacaagccaacaagcattttggggaaggcttttcgcgtaatgttgcgctctatcattgataaaggcatccagcaatcgcataccgtaaggaaccacatgcgctatttcacttcggacacgcatttcggccaccctctggtcaccgcactgcgcggattcctgaacaatggcaagctacgtgctgagtacctcgacatctggcagacgcagacccgcaccgccgcacacgcgtggatcaaacaatatgtgcacgacaatcagacatcgttcaaagcgatctgcgacatcacacgccacgagaacaccatcatcggcaacatcaacgagaccgtcgggcacgacgacgaactgtggattctcggcgacctctcctaccgttgcaccgtcgagcacacactcgaatgcctgcgccgaatcaactgccaacatctgcacctgatcatcggcaaccacgaccgcaacttccgcctccgattcaatgacatgctatacgaagacgtgttcgagaccatcgacgactaccgcgaaatcgacatggaacttcccgttctcgatgaatccggcaaaataacggtggcgaccacgcagcaaagcatcgccatgagccacttccccagactctcggcattggccgaagaacacggcgactggccgagcaactggaacgagttcgccgatatggcgcccaccaccgaaggctggctgctctacggccatacgcatcaggacgttcccgacggcaccgatccgcgaagtgtgaacgtgggactcgacgcatgggatttcaagcccgtcagcgaacggcaaatcctcgcctggcttgcatcccggtgcgccgaccaatcaaagtgaattccaccctgagcatggatccgggctgtaggatgccgggtcgctggtatttgtcgactccggcactccaggtttgcaaccattcgagtttgggacactgtcggcatattcccggatcaacattgccaatgatggcggtgacttgagctttgagctcttcggggatgatggccgtccatgccatgttgccacgctgcgccggatcgcctacgaattcttgcggcacgcttttggctgcacgcatgaactgcgcttgttcggatgatgtcaacggcaggcaattgacgataagtttgcgattattctcgattcccgcccatcccaccttaggacagacatgagataagcctttcacatatgagtggcgaatagattcagccgagtctgacttgaccccggctgaatcacatgtatgcgcccgtctgttcaggcaagggactcgtacgcttgcgcatcgaccggttcaagccattcgttgctcatcgcgccaggggctcctgccggaaccatgaacgccaggtgggagaaggattcgcccggagccgcaccatgccagtgcttggtgtctgcaggaatgcacacggcttcgccagctttgagttccttgggttcctgaccttcaatctggtagtagcctcgaccacccactgcgatgagcacctgggctccgccgtgatgtatatgccagttgttgcggcatcccggctcgaaggtgacgttgtggatggaaaattcaggagagtcgagcaccgacgcgagatagctttgacctacgaaatactgggcaaagccgtcgttcggctctcctatgggggaatgcgcttggattttccataatggtcctttcgttgtaatacgcgttcattgaacctcgacgaaaatgccgtgtcaatgtataacgagtgacgaacatgcttttccatacagcaaacgcatatacgtataatagaggcaagaggtacgcattaggttcattcgcggaccgagcggtgctatagaaagcaacatttcacacatccaaccgacaaaggagctccatctgatcatgaccgacatgaagtacgcgccgctaggctggtccggcatcaaagtatccaaagtatgccttggcggcatgagcttcggcaaaacctcaccggacttccatcagtggaccatcgactacgagatcggcggcacgctcaagcgtctagacaccgactatctcgaagagccgtataccgcgcatgagctagtcggtccgctttcccgcccaggagagaaggccttggccggcactttggctcccacactcaaggaaaccactcgaaactagattctcttgactccgtggggcagtatctgccatatatgctgagttagaggtcgaggctctccacccaagaggagacttcaccggccgaggcgttggacgagagccgttgtccttcctgccaatcaccggtgccgaccatggtcgtcaagtcagaaccgctgctgcccagcggtgatgacgaagaagcggcgaatagaatgacttcttgccgatgaagtcatggtcggtcacaaagtgattgaccgacaatgcagctccgccccaccagatcggatagccgatgaacacggtgatccaatcactcacctttcacagcgatgggcagaaacgttcagcagcgcccctcgtacaggaagaaggaaagcgaaccgtcttccaaaccaccttgagtaaaggaatccctgcgtatggtacgttccgctttacgcgtcaaaccacggtaatcataaaaaccgtaatcgcaggtagtgtcagtgaagaggaaatactcgttcattccagcatcacgaaacacgtcaagcatgtgattgaacagcttacggccgacacccatgccccgcgcttccggagaaaccgcgaacagcgttacctcagcctgatagcttttgccggcatctcgcttcaacacttcatcgacctgcaaaatcgcaatctgatcggcaagtcctcgacgaccatccttgcttgccaacaagggcaacgccaagcaatttcgcgcaatagcatgacgtatcctctgcgccgtggtaacacgggacctcaacgatcccaataccacgccaagcacccgaccatcacgttcagcgaccgtagcctcggtggtgcgagaaagaaaatcatgcatgtcgattgccgcaagtcggtgcatattgcgcagacgaatcgccttgcgcagcttgtactcacgcaactcgcgctcattgttcggaacattcccgttattatccgactcatcatccgcataccaagcctgtcgaacaagctcttcaagcgcaggaaaatccgtgcgacgcatcgtccgaagcataatcgtttctgaagtcatgctcccccatcctagccgcagccatgccaaagctccgttcatggatggcataatgcacatagtattgcaatagcaggaatgcgcaggatttgttggcattggcgtgcgacgcttgggagtctggggccacgtgcttaggatgagacaggattgcgtgcgacacgcaatgaatgagaggttcatcatggcaacgttgattagacgaatcacaggcactctatgcttagtactcgccgtggcatgcgcatgttacgctttcgccgtgcgcaatacgcattccggcacgagtttctggattgtttggctagcgttcgcagttttgttcgcgatactcggattcggtctgctcttccggtggtggacgatattgccaagactggtcagaggcatattgattgcggtcgcgtgtattggtctggtcgtgttcggcacagtggaaagttgcatcgtcagtaaaatgcatgcgcagggcaaaccggatcttgattatgtggtggtgctcggcgcccaggtgcgtaagtccggcccaagccttgtacttcgctaccgtctcgacaaggccatcgaatatttagatgagaatccgaataccatctgcatcgtttccggcggaaaaggaccgaatgaaccgttccccgaagcccaaggcatggctgactatcttaaggaacatggtattgccgaacagcgcattcttgaggagccggattcaaaaaccactgaggaaaacatcgtcaacagcaagaagatgatcaacgacgataatgcttccataggcgtgatcaccaataatttccacatgtttcgcgcgttgcagattgccgacaaatatggcttagacaacgcccaaggcattgcggccggctctcccccggatatgctcgtcaacaatatggttcgtgagtttttcgccgaaatcaaattcctgctgtagcccacgtttcggcaatctttttgctctggttaaagatccgaatacgaaatacattgaggggtgggatccatactggattccacccctcagcgccctagaaagatgactctaacgagtcaggcattaagagaagctcactcttcggaagcgagttcgtcagccaccgcggcggctgcggaagcagcttcaacgctctcggcttcttcatcttcagcggcttcgccgaggaaagcgctcaggtccagggtttcgccctcggacttgaaggtcacggcacgcatgccggcaagcagacccttggaacggccgacttcctgcactgcggagccgagctggccgttgcgcatgatggcctggatgaaagcgttcggatccatgccgtactgctgggcgatggaagcgaggaagttgaacacgtcggcctgggagaccttgatgtccagcttctcggcgagcacgtcgagcaccatctggtcgcgcagttccttctcaacggtttcttcggcttctgccttctgctccttggtggctttggccggatcagcggtcacacccttgagctgctgctcaaccatttcagccttgacgcccttcggcaccggaatctccagaccttcttcgagcttggcgatgaaagcgtcgcgggctgcggtggcctgacggccttcggcatcctgggaagcggccttcttgaggtcttccttcagctcgtcgagggtgtcgaactcggaagcttcggaagcgaagtcatcgtcgagttccggcagctcttcagccttgacggagttgaccttgaccttgacctgggccttttcgccctcgtgctcgccagcttccagcgtgccttcgaaggtggtctcttcaccggaggacaggccttcgagggcctcatccagaccgtcaagcatggtttcggagccgagctcgtagctcacgccttcctgggagtcgaccacttcaccgtcgatttcggcggtcaggtcgatgttggcgtagtcgcccttggcggccgggcggtccacacccacgagggtgccgaaacgctgacgcagggcttccagacggttgttgatgtcttcgtcggtgatttcagccttggcgacctcgatctccataccgtcgattgccggcagttcgatgtccggacggcgctcaacggtggccacgaacttcagcttggtctcgtccttagcggattccggcacttcctgaacatcgatgtccggctgggccatcgggtggatgcccttttcttcgagagccttggagtacagctccggcacgccgttgttcacggcttcgccagcaacagcaccgaaaccgatgcgctggtcgatgatcttgccgggcacgtggcccttacggaagccaggcacgttcacctgcttggcgatttctttgcgagcattgtcgagatacgggttgaactcttccggatcaacggtgatggtgagcttcaccttggtcggctcaagattcctgacgctgattttcacgcttgcgctcctgaaaaatacggttcttcacatttctgccgttaggcaacctctacataatagcgcgactcacggactctgcaaccagcgcgacctgccacgccctcgcgccctgttcggtgaggaattgcgcaacgtcacgtttttgcggttcgtcggtccaacacaggttgcgcagatactgcggtttgatgatgacgtccgcgggggtacgcgtgtcttccgctatctgcgccaccatcttgcgtgccttgtcaagcgttgcgagacgttccggataacgttccctccagactcgcgtcgctcgtggagcggatatgctctgcgcctcctggttttggggattgccgctttcgatgaccggccattcgctttccggcagatcaagcgcctgttggattattctcttccacatgcttggcttgattttacgttggatcggcgcgtaacgttcgaacattttctcctgttcggcaccggcttggatgcgtacacgctcgttgatggaacggaccgccctgaattgcgcggcgttatgcggcttgcgttccgccacttcgatgatggtgctgtcggcgagcagcagtgtcggcgaaatatcgtattcgcgtgccagttcatctcgtttggtccataatgctttcgccacggccagggcctggcggtccctcatgatttcggtgatatgcgagatgcgcagccatgggatgggatgctccttacgtggcgcagttccttcgcgcagcgcgtaatcgaattcctcctcagcccattcgatcttgccttgcttttgcagttcggcgcgcatggtcgtttcaagctcgatcagcaattcaacgtccagcgccgcataattacgccagtctcggggcagcggcctgtacgaccagtcggccgcggaatgctctttcgcaagcgtcagtcccagataatgctcggtaacggcagctaatccgaaacgtttgagccccagcagccgtgcagcgatttccgtatcaaacaaacgtttcggctgcaatcccaaatcaacgaatcccggcagatcctgcaacgaatcatgcagaatccataccgcatcacccaccgcacgattgaaatcgttccaatcagcaccttccgcagccaatgcctgcggatcaagcaatcctatgccggcaccgtctcttttgaattgcaccaaccaatcgtcatgaccgtatcggaagccagacgcacgttccgcatccgcagccaaagacccatgcgaagacgccaatgcgctgcagtactcgcggaatgccggtagggtgtcgatcacatcgggcacgccctcacgcggctcggcctgcaaccttggctcgtcagtcaacgggataatcctcctcggattgcgtcatggaccggaggaacctagcccacgcgcccacttgggcgcccgcgtcaaggcctccatcggcatagtctagtggcgtccaagacacacgaatctcacacccggtttcgggagcgtcggactgagtgccaaacgtcgtgcttttcgtgactgtgacggttcccgaaacatgttcgacatcgcacgaaccaacacggtccatcatcgcatcccaatacatggacggtatcagacaatcgccttcgcctccagacaacggcaacgcggcgaaagcgacgcaacgccaatgagaatgccagtcatttcggtatttgtgcgaatacaacatcatgatccagcctgtggaacgcgcctcgtcgcattgcatctcaactccaatgccgaaactcgccatggcgcacggcactggaatctcacgatacgacacgcttggtaatcgaggcatgcgttctacggaaagcacggcgtcccataccttgtctggcacaccggagggtcgggtcaacatttgttcaggagggtcggcgtaggcgcacgatcccctacctgtggcacgcgcttcgttgggcgtgccttgaggaaaagcatagatgtccaccatgattcaaggctacggcagagtcgccggttttgcggtatttcacagcatttcgccacgcgtcgaatgtgaagatttttccgcgtggcgaatgctggttcaacaattgcacgaatattcctttttccaatcgctgaggcactttcaaacgattgatttgccggaatcgttggctggaatatgcgtggcttcgcgtttagtagacggtgaagccgtgcgattggaattgttccaccacacgctgtttcattgcctcggacggccccttctggtcttccaacgggtagggaatgttgagcatatgccattttggacggccaagctggtggaatccaagcacatcgatatgttccactgcgtcgccgaacgactcgcagatcttcgccacattctcaacgttttcctcggatgaggtgagtccgggcacaagcacgaaacgcacccagatcttcttgccgcccttggccagacgctgtccgaaatcgatggtcggttgcagaatgccgccagtcaccttcttgtaggtttcctcatcgccggacttgacatcaagcagacacaggtcgatgtcgttcagcatgtcgtcggtatagcttgcgccaaggaatccggaagtatcgaggcaggtgtgcacgcccatctccttggccgcacggaacacgcgggaaacaaacgccggttgcatcatggattcgccgcccgagaaggtgataccgccatgcgtcgccttgaaaagatccacatagcgttcgatctttttgaccatggcctcgtaatagacgggcttgccgtcacgcattttccacgtatccggattctggcaatactggcaacgcaatgggcaaccgctcatgaagacggtcatgcgtgttcccggaccgtcgacggacgtgttgatgtcccaggaatgcacgaagccgatatcaccgcttttcagcgcgttgatgcggtcacgccggtccagtccgatcggcgattcgaagcctgacaaccctcccataagcgtttggttgacgtagttttgcgattctctgagcatatgccttgttgtggagcgaaaatgtacgttctcagacatcggtgtcctttcgttgtatctctccaatggtttccccacattgtacagggaaaaccaaggggcgaagctttcacgctccgccccttgcactctaccgcttcacacggtaccgttcagtctcagtcgacgacggcgccctggtggaacgtacgggagatcacgtcgagctgctgctccttggtgagcttgacgaagttcaccgcgtagccggagacgcgcacggtcaggtgcgggtacttttccggatgctcgacggcatcctcgagctgttccttgcgcagcacgttgatgttggcgtggtacagaccgtggccgttgccggcgtccagaatgcccacgaggttgccgatgcgctcatcctcgtcgcggcccaagccatcaggggtgatggtgttggtcagcgagatgccgtcaagagcgtcgttgtagtcgatcttgccgacggagaacatggaaggcagcatgccatgggagtccatgccgttctccgggtttgcgcccggagcatacggggtgcccttcttgtggccggacgggaaggcgccggtggccttgccgtattccacgttggaggtgatggtcaggatggactgggtcgggaccgctccgcggtacaccggcaggcgcttgacctggcccatgacggtggagacaacccacttggcgatctcgtcggcgcgatcatcatcgttgccgtacagcgggaactcaccctcggtgcggtagccgacgatcagatcgtcatcggcgccttcgacgtactcgtcctcatggcccggagtggtcttggcgtccttgttgtagatcgggtagaccttggcgtacttgcatgcggacagggagtcggctgcgatggacaggccggacatgccacaaccgagggtacggtacacttccttgtcgtgcagagccatctcgatggactcgtatgcatacttatcgtgcatgtaatggatgatgttcagagccatcacgtaggtctcggacagccattcgagagccttctcgtagttggccttgaccttctcgtaatccaatgagccgtcggattccggctgaatcggctcgataacgcccttgtcgatgacctgcatgccggtcatttcgtcgcggccgccgttgatggcgtacagcagagccttggcggagttcacacgagctgcgaagaactgcatctgcttgcccacgcgcatcggggagacgcagcatgcgatggcggcgtcatcgccccagtgggagcggatttccttgtcggactcgtactggattgccgaggtgtcgatggagatcttggcgcagaagcgcttgtaggcttccggcagcttcggatcccagaagatggtgatgttcggctccgggccaggtccaaggtgctcgagggtcagggtgtcgagcagacggaaggaggtcttggtgaccagcgtacggccatcatcgccgaagcctgcgtcggaccaagtcgcccagtacggatcgccggagaagatcgcgtcgtaatccttggtacgcaggaagcgcacgatacgcaacttcatgaccaagttgtcgatgatctcctgtgcgtcggtctcggtgatcttaccggacttcaggtcacgctcgaagtacacgtcgaagaaggtggagacgcggccgaacgacattgcggcgccatcctggctcttgacggaagcgaggtagcccatgtaggtccactgcactgcttcctgagcggtctgtgccggacgggacaggtcaagaccatattcgttgccgaggttgatcagctgcttcagggccttgatctgctcgtcatgctcctcgcggaagcggatccagtgctcgatctccggctcggtgaagtcgttgcggtacggcacggagtccttgtcacgctgcttgaacttgatcagggtgttcacaccatacagtgccacacgacggtaatcgccgatgatgcggccacggccgtaggcatccggcaggccggtgaggatcttgttgtggcgggcaaccttgatctgcttggtgtacacgccgaagacaccgtcattgtgggtcttgcggtacttggtgaagatcttcttgatttccggatccggctccttgccggcttccttgatggcctgctcgaccatacgccaaccgccgttcggcatcatggcacgcttgcaaggaacatcggtctgcagaccgacaaccacattgtcgacttccggagagtcgatgtagccggcgccgaatgcgtcgatgccagccggtgtgtgggtgtcgacgtcgtagacgcgctgcttgcgctccacggccagatagttgtcatcgagatactgccacaggtgcttggtcttctcagtggcgtcagccaagaaggactcgtcgccctcataaggcgtgtagttcttctgaataaagtcacggacatcaatgtccttctgccagttgccctcagcgaagccttcccaagccttagcctgaagctcttccggggagactgccgtcgcatcaactgctgccatttccactccttctgggtgttggtttggcgacgcatcgttacgtcgtcgctagttaccgattctagctgcacgaacctgtaaagaacctgagtttgagaggaaataaaagtgacatatgtcacacttgcgaagtataagaaaaaatcgcggtgccgtaatccagacaccgcgatttcttatatcgcatcaactacttttcatcggaagaccagcgtttccattcgcgatcctgttcttcccatttgatgttgcgttcctgcacgatcttccatgcatcgagcgcgtcttccctggttttgtatggtcccatacgatggctcgccggtgagatcatgcccagttcaggctgttcggtaaccgtattgaaataccattgcttttccatatcactccttacgaagcgcgtaacgaaacaatagtccgccgctgttctattcgcggaacgcgttggtaatcggcaagcggcggtcacggccgaacgccaatgccgtcacctttggcccaagcgggtattgacggcgcttccattcggcacgatcgaccagtcgcataaccgtgtcgacggtggtctcatcgaaaccgtctgccagaagatcctcacgaccatgcgcatgttcaatgtacattgccaacacctgatcgagcagctcatattccggcagcgaatcggagtctttctgccccgggcgaagttcggcggatggagccttttcaatcgaattgacgggaatcatcacgccgtccggcaacggcgtccccgcagacccctgctcgttgcccacgatatgcagtccgccaatgcccatgccttcggcggcagccttgttgcgccagcgggagatctcccacacacgggtcttgagcagatccttgatcggagcgtatccgccgaccgcatcgccgtaaatcgtggaataaccgcaggcaagctccgacttgttgcccgtggcgacagccagaagccccttggaattcgaatatgccatgacaatcacaccgcgaatacgcgcctgcaggttctcagcggccacaccttcaagatcgagctgcttctggaaggagacgaacagcggttcgatgggctgaatgtcgtagtgcgctccaatattcttcgccagatcggcggcatcatctttcgaaccgtcagacgagtacatgctcggcatggaaatgccatacacgttagctcctcccacggcgtccgcggccatggccgccaccaatgcggagtcgatgccgccggaaaggccaaggcacacgcccttgaaatggttcttggccatataatccttcaagccgagcacacaagcggtatacacttcctcatccggatcaggcttggccgcgataacaccaacctgctgatgttcggaggcagtatccaaatcaaagaagctcaaatcctccatgaacatcggagaacgttccagcagtgtaccgtcagcgtcaaccacaaaactgccgccatcaaacaccagatcatcctgaccacccacctgattgaggtagaccatcggcgcgttcacttcagccgcacggcgtaccgcaagatcgagtcgagtatcagtcttaccctcctcatacggagaaccgttcatggtaagcagcaaatcaatatgctgctcggcaagttctgccacaggaccgccatcctgccagatatcctcgcaaatagccacaccaatacgtgcgccattcacatcaagcaccatggacttattgccaggactgaaaatgcggaattcgtcaaacacgccataattgggcaggaagtgcttgtcatagccggcccaaaccacgccgtcatgcaatacgacgagtcggttgcgtggcttggatgtctcgcgatcagtgccgaccgtgccaaccaccacaaacaggtcgccaagcccatcggcagccagttcggtggcgagccagttggctttgttccacgcggctttgcggaaggtggcccgcagggcgaggtcttcgatgggatatccggtaagcgtcatttcaggaaagaccacgacttgtgcgctgttgctggaagcgagatgcgcatagcgcatgactttgtctgcgttggagtcgaggtctcccacgcaagtgtcgatttgggcgagggcgaaacgaatgtctgtcatagttgactagtgtattgcgatttgcgtatcagatatgcaaacggcacgcatatggcgagaaaaaccacatgcgtgccgaatgatcatcgtgcatatcgctatatcttcagctatcttcgatcacaggagaattgggccgaagatcgaccagcttacgcaagttcgttcaacacggtaaacgctgcgttggtatagaattccacgcccgcctgtaaagattcgtccaatcccacgaagttcgggctgtgccagtcggggcatccttcctcaccattggagccgatgaaggcgaacacgggcaacgcaacctcggtgtattcgcagaagtcctcccccgccatcgacgggtggatcggctcaagttgcgcatattcccgcacatcatcggccacgatcttcgacagtccctcgtcggagaccagcggatcctggaaatcgtcccagtcgatgtctgcggtgatcccgtagccagctgcgatggcgttgacctgttccttgaagcgttcaccgaccatgatgccgtctgacttgtggaagtaacgcacggtaccttggaaacttgccttggccggcaccacattccatacatgaccgccatgcagttcggtgatggaaagcaccaatggatggaatggcgacacattacggctcacgatggtctgcaacgcgagaatcatcgtggcgagcgcttcgataggaccggtgcccttgtgcgggtagccggcatgcgtgcccgtagcgtggagcgtgacatggaatttcacgcatccggccatcatggggtcagggccgatggcaatctgcccgggcgcatagttggggttgttgtgtgcgccgatgatggcggagacgtcggccagcagtcccgcgtcgatcatggcgcgtgcgccggtgcctgtttcttcggacggctggaacagcagtttgatggatcccttgatttgtttgcggtgtttggcaagccagaatgccgctcccagcagatatgacatgtgcaggtcgtggccgcagccgtgcatgactccatcgttgaccgaggagaatggcaatcccgtgtcttcctgaatgggaagaccgtcgatgtcggcgcgcaatgcgatgcgcggtccgggttgttctccacgggtcagcccgaccacacccgattcgagcggattgttcaggatttcgatgtcgtgcgctctgagcagttgctcaatgtaggcgcttgttttgaattccttgaagctgcgctccggatgggcgtgcaggtaatggcggatttcgatgagttccggcgtgatttcgacatgttcagtcatcttgcgtgaatcccccttggttgcttctctccattaagattaagcggctttcaccgttgctgtcagcgtttcagcaggtgcttcgcgatggcattggcgacgccctgcaccacctgaacaagtacaatcataatgattaccgccgtccaagtcacagtctggtcgaatttctggtatccgtaggcgatggcgaaattaccaagaccgccgccgccgatgtatccggccatggccgacatgtcgagcacgccgatgaacaggaacgcgtaggcgagaatcagcggcgcgagcgcctccggaataagcacggtacgcacgatggtgaatttcgaggctcccatggctcgtgccgcttcgatcacaccggagtcgacgggaaccagattctgttcgacaagcctggatgtggccatggtgcacatgatgatcatcgggaagatcgcggcggccgtgccgatggaggtgccgatgactttgatggtcaacggttgcatggctgcgaggaagatgatgaacggtatcggtcggatgatgttcacgatcacgtcgaggatgcggtaaacgaccgcgttttcgaataggttgccaggacgcgttccgtagagtaccacgccgaggaccagtccgagaataccgcccacgatcatggtgacgagcaccatttccaaggtttgcccgatggattcaaacaggagcggtcgtagtaccgtccagtcgctacggcttgcgagggttacgccttcaatctgtgtcatgcctgctcctgtccggccttgataagggcctgttcatatggtgtcggctgtgccgcggtaccgaaatcgacgatatcgctgttttgcgccagttcgttcaggaacgattcgacattatctccgccgaattcgtaggtgatcgctccgatggccacgccgttgacagtgtcgataccgccgtacaggaggctgcttcgtacgccgtgtttggcgataagttgtgagatgttctgcccggatgccgcgatgacggtaccgtcttcacgctcttcgacgtcatgctgtcgaataagcactgtgacgatgtgtccgagattttcctcatgcatggtgttgatgcgcgactcttcaggaataccactgatggcggtggagatgaatcgtttggtcaccggctgtcgcggggccgcgaacacgtcgtaaacgctgccggattccactactttgccggagcttatgaccgccacacggttggcgatctgctgcacgacgttcatctggtgggtgatgagcacgatggtgatacccatttccttattgactcgtttaagcagcgacaatacttccgtagtggtttccggatccagagcgctggtcgcctcgtcggcaagcaggatcttaggattcgtggccaatgccctggcgatgccgacgcgctgcttctggccgccggaaagctgcgacggatatttgttcgcatggtcgcttaagcctacgaagtcaagcaattgcgccacgcgcttgtcctgataatccttgcgccaatggtcgagctgcaacggataggcgatgttctgcgccactgttttggtggagaataggttgaactgctggaagatcatgccgattttctgtcgaatcggacgaagcttggattcgctgagcgacgacacttcggtgccaagtaccgtgaccgtacccgatgtcggcttctccaaagcattgatcaggcgcaccaatgtggatttgccggctccggaatagccgatgatgccgaaaatgtcaccttcgttgatggtgaggctcacatcgtcgacggcgcgagcaacggtcgtgccgcgtttgccgccgtcagtgccgctgccacgctgccggaactccttgaccacatggtcgaatgtgatgatcggtgtgtgttctgtcatactgccgctttcattaatggtttttcaacccttgaccatacaaccacgcctgacgttggtcgcacatacaggaaagccccctccttggagggagctttccgaaaaggacttactcggcgtccttggcttcctgttcgatcgtcttcaggtaatcctgaagttcggatgtgctgaacttgtcagccagaaccgcggtgccgccggaattctcctgcagcttgtcaagcacgctcgaggtctggaagatcttaacgaccttcttgtagacctcgttgttcacgtcggccttgcgagtggcaaagatgttgatgtacggacgggcttcttcggattcggcgtcatcctggtaaatggcgtcggtggccttcaaaccagcgtcggcgacataatcattgttgatgacgcctgccgcgacctgcgggtccttcagggagttggcgacctgttcggccttcagcggggtgaccttgaccttggacttggattcgtcgatgtcctgcggagtggagaacggcgtccaatcgcccttcatcgtcaccaagcctgcagccttgagcacgccgatggcacgggcctggttggtctcgtcgttcggaattgggatggtgctgccttcaggaatctcgtcgacgctcttgtacttggtggaatacacaccgagcgggtagattgccacgccgccgatcggctgcagatccttgttgttctgcacattgtagttggccagatacagtaggtgctggaactcgttgaggtcaagctcaccggagtcgacggccggattctcggaagtgtaatcctggaaatcaacgatatcgacgtacaggttctgcttttcggcctgcttcttgaattccacccactgcggatcggtggcgcccaccacaccgatcttcaccgggttggcctcggttcccttttctgcggtcttgtcgggtccgttgaacgcacgaactccaaagaacgctccgaccgcgaccagtgcgaccaccacgacggcgatgatgatgttacgtaccgtgtgattgacgcggaccggttcttccggcaatcctgccggctgctgatttgcttctgccatgatgaatcctctctcttcttcttcctcattgctttgcatggtttccaacgtgtctgtgatggactgcatgccatcgcgtcgtgtccaaccatacgcgacgcttccgctgcgagacgccgaaacctaaaaattgccttatcggagttcgttatagcgggcgttcaatcgcaatgattccagcattttcatcaatcctccggaatgcatggaatcatgcacaatagtggcatgcacaggtgtgtcggcaatcatgtccgctccctacactgagacaagcgagcaattacgaaattgcatattcggaaggtgttttccatgaccacaatcgacattaaagcggcgtttttcgatatcgacggaacgttgacgagcttcaccacgcacgtcgtaccgcaatccaccattgacgcattgcgcgcgctacaatccaatggcgtcaagattttcatctgcaccggtcgccctcctgcgcagatgaatgtcgtgttggataccattcccgtcgatttcgatggcattgtcgggttcaatggccaatactgcattgacgacagcggatttttggaaaagcatacgcttgacgcaaccgatgtggccacgatcgtgcgttggctggatgagcatgaagacatcgtcgcctgcatcggcgaagaggattacgtgtatttcaaccacagcaacgatcagatgcgccgcacgtgggcaagcctgggtaagaccgcgccggacgtattctttgacgatcctcgagtgcgcacggcgaaacatgagacgttccagatgagcccatacatcagtcgtgaccaggaagccgagctgttgtcgctgctgacgaacacgcgtggcgtgcgatggcatccggatttcgttgatctgattcccgctgacggcggcaaggatcgtggcatccaacgttttctcgaccattatggctggtcgaaggagcaggcgatttcgttcggcgatggcggcaatgacgtggatatgctgcgctttaccggcatcggcgtggcgatgggcaacgccaccgaagagccgaaggcggtggccgattacattaccgatgacgtcgatcataatggtatttggaatgctctcaagcatttcgacatcatctgacgatctaccgttgaccgtatttcatttcactgcagcaagtagatgcatgcggcatcacaagtttcccatcgctctgtctccgcaataaagcaatcgaccaacacttccggctcatcggaagacggcatttcgggctgcgcgcaatgcgcacatccgcaaagtcatgcaaatactagttaacgcaatactatttggtggattttgttcccgatgtttttcgtatagcaccctaggtcaaccctttttggtattttttcattggatatgccatacgatgggatatcttttcggagtatacgagattagggaaaatatggtcaaccaccataaaatgattaatgctgcaatcgcaacgcttgcgacttgcgccatgttgctgccggtagtaggcagcgccaatgctaatgaatcctcaaataccgccgtacttggtgccggctatacggccaccaagatttcgcaccccaatgcagggctgggcgaagacgacggtatcgtaaacgttttgaacggtgaatccattgatgatctcacgcagggtttgcccgagcgtggtcagaactattcatgggcttcggccggctacggcgactggatgtatgtgggcacctgctattccgcaatgggttccacgctgaaatacatggctaacaccatgggcgccaagtatgccagcatcaaggccgctttggatgttgcgttcaacggcgagctgttcctcgacaatggcgagaaccacagcttgctgctcaagatcaacgtcaagaccggtgaagtgaagatcatcgtcaatgcgattggcggagagcatgcggtcaacggctatcgtgcagccgttgaattccatgacaagctgtactttgctgccgccgcaaagggtcagccgtacctgctggaagttgatccgaacagtggtgatgccactgaaatcgtgtatcgttccgctgccctgaccactggtctgaagaagggctacactgctggtatccgtggtttgaccgtggtcaacaatcagcttatcgccagcatgatcaccgataacggtgccactattgtggcttcttccaacccgtcagcaggccaggattctttcgccactatcgctacccagaccgagggcctgtacaactatccggcatgcgctgtaactgatggagtgttcggtggatgtgtgtgggatatggtcggcttcaagggcaatctctatgtcactatggtgactggaaccgcgaagaacaacaagcaatccttcgcactcgtgcgcggcacgcaagataaggaaaccggcaagtggaccttcaagccgctggtcggcgatccggcagacggcgccaagtacgagtggggtttcggagcgagtcgttccggcgcagccaacatggtggtatacaagggccacctgtacatcggcggctacaacgatccgatgaacgctttggagaaggccatgcagatggatttctccgacctgtacaaggatctggagagcccggtcaacctgtggcgtatggacgttgacgaagacggcaacgaaaacttcgaaatgctcgccggcgaagccaacaacaagtacttcggcgattccaaaggcaccatcgatggcaataccatgctgtccggcttgggcgacagcgacgagcagagccgtcacctgaaccagtatgtgtggcgtatgcagtcctacaacggcaagctgtacgtcggcaccttcgacatcagtgatcttgcatacccggcaacccagttcgccaacggcgacattctgaagcgtactccggaagagtggaagaagcagatcgaatacatcaagatcttcttcgactctctgaagaagaatgaccagaacggcacttccggtactatcggcacggactctcaggaagcctccaagccttccgagtccgaatctcaggaaaccaccaagccgagcgatgatgacatcatgccgttgaacgaaggcgaagcatctgagagcgatcaagctgcacaggcagttgaagaagccggcaagaccgacgaagtggccgctgacgtggctaccatgcagcagctgctggaggacatgggcgctgatctcaactccaagcagaccgacgtggtctcccctgacggtgtcgctccgcaggccgctgaaacctacacgctcgacgatcgttaccagttcctcgcatccctgcagcggctgctcgacctgtacaacaagaacaagcagtatctgccggaattcattaccaacgagctcgacaagtggcttaccgaagagaatctggagaacttcatcgacttcgtgggcgtgctcagctacctgcattactccaacgatgagactcgtggctttgacctgatcgtctcctccgatggcacgaacttccagaccatcagccgtaacggtttcggagataacaacaaccacggtctacgcgtgttcgccgtcaccgattccggtctggcaattggcaccgcaaacccgtaccatggcactcaggtgtggctgctgaatgatggtgaaatcaagaatgctgagctgacgaatggcgatgcattcgactacgacaagtatgatagcgataagaagagcgccaacgccaacggtctgaccgttggcatcaaccccaatggcaataccgtggaagacgtacagtacgactaccagtcactgaccgccggcacggattacaccgtggccgatgacggttccatcgtgttgagcagcgcattcctcaatggtcgcgaaaccggcagcaccggttctgtggtggtgttctacaaccagggtgcacgcgtgcgtttcactgtggccatcaaggacagcacgccgaacgcaccgaagaaggatgatgacaagcagaatacgaagcctgccgcacacaagaaggcaaacactgccaacaccggttccaacgtaatcggcgttgttgtggtggtcgctgttctggttgtcgcagcaggggcattgttcgtgttcaagcgcaagcgttcctgaattgccagagcctgttcttaggactcattcctaagttcgtccgcatataacaatcccgtatgatccggttcgccggaatcatgcgggattttttattttgcaggaatcgcccatctcacgtcatgtcaaactgccatcacaagctgatttcaatgtgcgatatgcaaccatgtggaagttccgatacgggacccattgaaaatggcacgcaatcctacaaataacagattcaccgcaagccacagcaatgccatacgcagcgcggaagacgcctgcatcgcatcgcatatccaaccaatcgcagcaagacagggtacatatattgcagctgtcgccgtacacgtcaatgcaagataacggtaatcccctgccccaatcagaatgccatcaacagcccacatccaaccagccaacggcaatgtcacgccaacaaccaccataccgacagtgagcaaatgctggatctcaatcgactgagaaaacagcggggacgcacaccatccggcaatcatcaaaccaataccgattaccgttcctccgcataatcctgccctgccagcgattctcgtcaaacgcatggcttcatcctcttgacgggcaccaatctgcgcggcaaccaacgtctgaccggcaataccaatggcatcaagcatgttcaacacgaaattccaactggaattcaccacctgatacgcagccaacacttccacgcccatatgcgtagccagcaccacattcgccaccaggcatgcgcgcaacgcaagcgtgcgcaagaacaacaccgcaccatcgccagcactgttcaacactcctgacaaacgcggccgtaaacgggcaccttccgcacgagtccacaacacagcaggaacaatcagcactaccgccataaaccattgcgaaatcagggtggccactccggaaccaaacacaccccaaccgaatccgagaataaacagcagatccagcaacgtattgagtatcgcacccagcgtagcagctaccaacgtgacgcgaaccttctgcagtccgcggaaaataccgttggccgcatacaccagcaacatgccgggaataccgaacaccacggcacgcacgtagtcaaccgcgttatgcagcacactcccttgggctcccatggccatgcacaacgggcgtgcaataacgaacagcgccacagacaccaccacgccaatgattccagccagccacagaccatcaacgcctgcttccaagccttctctccgcttgccggcgcccaaaagacgccccacctgcgatgtggtgctatacgcaaggaacacacatagccccactacagtgagcacaatggttgacccgaccgacagaccggcgagcgcctgcccgccaatatgtccgacgatggcggtgtcgatgagcacgaatgctggttcggcgataagttgcccgaacgttggtatggccagtgtgagaatggtgctgatggtggtgcatgatgcgttgtttgcggtatctgtttcgtgagtgttctgcgaagttgatgtggtcataatcgtaagcgtctggtgtgtggggaactgcatgtgcagtgtaaggtcacgtgtttcatcatcgccgttgattgctcagattttggctatgtctgttttgcgcttttgagaatgtcgttgaaggttttcgctgattgtctgcataaaggtagaggggcatataattcccgaaccgctcgtgacgcatagtccaagctcctgcgagacccattcgaccccatccaaaccctagtggattcccgaatccgccttcgcagtaatacttcatgtgaccgtcgaacttagccccgaacgcgtcaatgggctaccgcctggtctcaagcccatgagacactaggaaccatgactacagttatcatgcgcaccactgaaggcgacatcaagatcaacctgttcgacgacaagaccccggaaaccgtggccaacttcctcggcctcgccactggcgagaaggaatgggccgacccattcaccggccagccgagccacaagccgttctacgatggtctgaccttccaccgcatcatcaaggatttcatgatccagggcggctgcccgctgggcaccggcactggcggcccgggctacaacttcgatgatgaaatcgttccaggactgaccttcgatcgcccatacctgctggccatggcaaacgccggcctgcgccgcggcatggacggcaagatccacggcaccaacggctcccagttcttcatcaccaccgtgccaaccgaatggctcaacggccatcacaccattttcggcgaagtcgcggatgacgagtccaaggccgtcgtcgacaagctcgactccgtggcaactgaccgttccgatgctccgctcgagccggtcggcatcacttccatcgaagtgctgaagtaagtttcgcatcaacaagacttacggcaaaacaatgaaaagcccctcgcgtgaggggcttttcattatctccgagagaatctacagcagttcagatgagtctcacgaccgcactgatcgtgtcatattttgcgtaaacgaggttcggcggagtccttggcaccggtgatacgatacacatcgaacacgccttcaatcttgcgcactgcggcaagcaaagtattcaaatgctgggggtcggccatttcgaagctgaattggctagtggccacacgatcggttcccgtggaaatggagccggaaataatgttcactccatggtcggaaagcacgcgcgtcacgtcgctcagcagatgcgggcgatcgagcgcctccacctgaatcttgaccatgaacacgcccttggtactcgtccactgcacgtcaaccacacgttccggctgacgcttctgcaagtccagcatgttctggcaatccacacgatgcacggacacgccctgattgcgggtgatgaagccgatgatgttgtctcccggcaccggcatgcaacatcgggcgagcttgacccaaatgtctcccacgcccttgacggaaatgcccagcgagctggtggtcttcttggtgcgttccacctgcttgaacggcagagcctcctgctcaacctcctcattcacctcgtcgctgcccgcatcacggaccagatgcgagatgacattctgcgtggaaatctgcccttcgccaatcgccacgaacacggcttcggcattggcaagattcagctcatcagcaacaccgaccaacgcctcgggagtcagcagagtcgcaatcggaagattgcgcttgcgcatggctcgtgtcagctcgtcacgaccttcttcgatggcctcggtacgacgctccttgctgaaccattggcgaattttgttgcgtgccttcgggctcttggtaaagctcaaccagtcacgagacggaccagccgattcggacttcgacgtaagcacctcgacggtgtcgccgttttcaagcttggtgtcgagcggtaccagacgtccgttcacgcgggcgcccatggtacggtggccgacttcggtatgcaccgcgtaagcgaaatcgatcggtgtcgcctcggcaggcaacgatacgatcttaccttttggagtgaacacgtagacttcggcagcacccagatcttccttcagggagccaaggaattcattggaatccggggtctcactcgtccagtcggcgagctgctgaatccacttgaaattgtcagcctcgctcagctcctggttctcgccacgtttacgatcggacttatcgggcgagctcagcgcacggccagcttgaccgttctccttgtacttccaatgcgcggcgataccgaattccgcacggcgatgcatgtcccacgtacgaatttgaatctcgacaggcttgccgccagggcccaccaccgtggtatgcaggctctggtacatgttgagctttggcatggcgatgtaatccttgaaacggcccggaacggggttccaacgcgcatgcaccgcacccaacgcggcatagcaatcctgaatcgtgtcgacgatgatgcgcacacccaccaaatcgtagatattcgcaaaatcatgaccacgtacgatcatcttctgataaatcgagaaatagtccttcggacgtcccgttacgtacgccgtaatgttctgttcgtcaagatcttcgttgatctccgcgagaatctgcttcaaatacacgtctcgctggcctgcgcgacgggccaccagcaccacgatctcgttgtagatcttcggatagagcactttgaagctgagctcttccaattcggttttgatcgcgttcatgccgagacgattggcaagtggcgcgtacacgtcaagcgtttcatgcgctttcttctgcgcgctcggagttttgacgtaacgccaggtacgcgcgttgtgcacacggtcggcgagtttgacgaccagcacacgcacgtcgcggctcatcgcgaccaccatcttgcgaatggtttcggcttgcgcggaatcgccgtattccatcttggaaagcttggtgacgccatcgaccaaaccggtcacggtatcgccgaactcggcgcggcactcatcgagcgtatagtcggtgtcctcaaccgtgtcgtgcaacaggccggcggccacaaccaacggtcccatgccgagatcggcaagaatctgcgccacggccaacgggtggatgatgtacggctcgcccgatttgcgccgttgcgaagaatgctgcttgaccgcacgctcataagcgcgctcaagaatgcttatgtcctcatcgggatgatggtattcgcacatcttcaggatcggctcaagcggatcaagcggattcgtgctgatctcgcagcccaacattcgggcagaatgaacctcacgctcaacgtcacccatcgtccacctcctcgctcgcaatgctccctatactacccgcgcctcaccgtgcatccgaggcatccgaccgcgtgttgcacggccaaatacccccgaaaccattgagacgtcagcgtttgccgattcctctgcgactaagccagtgcgttcagctcaggaagccacgcctgtggaaccaaacccacgctcagcgcgatccgacccaggcagcgtttccgcctcgatgaacttcgcttcgacgtaacgctgaataaccagctgcgcgatacggtctcccggatggaacgtcacggtgtgttccggatcaagattgatcagcggcaccttgatctcaccacggtaccccgcgtcgatggttcccggcgcattgagcacagtcacaccctgcttgacggcaagaccggaccgtggatgcaccagagccacgtaacccgctggaagggcgatcgccactcctgtaggcaccagtgcccgctggaacggcttcagcgtgacttcctccgtagtgcgcagatcagcgccagcgtcaccggcatgggcataatacaattccgccggatggtcaggatccagcgactttaccagaacctcgacgttttccggttcgttatatgcttcgtcgaacgccatcaggcagcgcactcctgacacaccggctgaccgtcgtcagtggtgtaggcaagctggctacggtgcttcaccaggaagcattcggagcagatgaactcgtcaccctgcataggaatgacggtcaccgaggcgtcctcattgctgaggtccgcaccgggcagctcgtaatcttcggcgatggcgttctcgtcatcgtccatatcgttggaagtgttctgggagctcttgcccaaagcctggagcgactcctcgtcctcgtctttgttgcgcggggaatcataatcctgtgccatcgagattcctttcgtcatctatggtgcttatgcgccataggatacatgacttttaccccgcataggatacacgaatcgaaatactcgtaaaatccgacacgtggggcacaatggaataaacagaaattcttgaaggaaagtggtgtgttgtgcctgggaattcactcgaggaagcgcggttcgatcatgtcagcgacaccggtgaactcgtctttgtttcaggtgccggaaagttcgctgtaaagatcgacgaagcgcttgaaagagccattttggaggccaagcagattcgttccgaagtacaggaggaacagaagacacgcatcccacccaccctgccgatttcacaaattcaatcgttgattcgcgctggcgccgatcccgcgcgtgtcgcggaaagatattcgttaagcgaagcgcttgttcggcgtttctcggcttcggtcgaaacggaaaagcaatatgcgatcgagcagtttctcgccgttccagcgccgaaggaaagccgcgtacgcacgctttccgaactgatcgaacgcacttttgcggcagcgcgggtgcgcttggaagatgtgacttggaaggccaccagacttggcttggagccttggaaaatcagcgctcagttcgtctcctccggtcacaatgtctgcgcggaatggtcgtggaacatgcacgacaatgccgtaagctgcctgaattccgcagcacgaaaactcattggagaacaggacacgtcgaaagaaggacacgccgagaaacacgccgatgaaaattttctcgtgtcactgaatcttcccggaaattccgcacggtcggcgcgtatcgagcaaacggtgtccgcatggaacacgcccgagccgtccatgcctgcggcccgtcccgcggcagcgccttccgttccgatcgcgccaatcggcggcgtgtctaatgaatccgacacgcctgacacgccgaacgcgccagccatcgcatccgacttgcctctgccgagccgaccggagaaccctgctgcaggagccaatacagccagcgcaacaaacaccgacacacgcaataccgttccatccacgccggagcctgcttcgaacatggcgaacgagaaccagacacttgacccgcatagccagaacaccaccaaatcgaagcggcgtgccggacgttccgccgtgccaagctgggacgaaatcctgtttggcgactgaagttaggccacgtcgatcaagcagggaatgtcggattcgagcatggtgagcgacccgtgcacgcttggcaggtgcatcgccttttctgcttgcgtacgtgagtccacaatagtgacgactttggcggccgatacgatcacatcgccgatcatcggttcgacgcgagcttccaccggcccatacacgccttcatccattgcctgcgagcgcgtgcgcacctgcgcacggtcctccagcacgctgcgccatcgtgtggcgatgtcttctggattctcgccttgttccgcgtagagcatgacgcaacgcggttcaccgccgacatgggcgacgccctgcatgagccgctgatcctgtgcaatgtcaatcacagattcgggatcagtggtgatcataccgtggtccgccacaatcacaatcaatgtgcctttgggcacgctgcggcggagaaggccgagctgagcgtcaacacgctcgtacgtgccaatccatttgtcggaatcccaaccgtaattgtgcccgaccttatcggtatcacgcagatacaggtacgtcagtccgggcgtttttgccgcttgcgccgcggctgcaatccgttttcgcggatcatcgttggaaatgtagtcgctgccccgtaacgccgcctgcgtcaacgcggaaaaggcgaatttcggcagtccagaactggtcactcgaacatcctgcgcgctcagccgttcgaaaatggtcggttgttgctgcaattcaagcggaggaattgcgtttttgaaggaaatcagctggcatatttcatcggttttcggattgagctgcgtgtaaccggtcataccggtcataccggggcatgttcccgtaccgaaggtagacatggctgcgacggtggtgcttggcatgcatgttgcgatgggacgttgattggcggtgtcgttcatcagcgcacgcaagtagggggcatgtcccagcctcatgttgagattccagtagccgagaccgtccacgagcgccacaaccacggaagtcgcatcgggaatgccgagcgctccctgcaaacgcttcggatcaggatggactgccgttggcatggggtatccgatggcgttggaaacagcaggaagtaccgatgacaggtgcaacgctcccccacgggttccttcagatgacacgtcatcgccgtagcatgccggttcggtcatggtgagcagctcttcgacgcttggcacttcaacactcataattcccattcaagcaccgcggcggtaccggctggtagcattgctaggttgattaccattacttttccgtgaggagattcaccgcatggtgtcgcaccgcaaaccggcaaaaccagcctttgacccgcgtacggtcaaagagaacatcgtcgaaacaccgttgaatgaggagatgagcaagtcgttcctcgaatacgcgtattcggtgatctatgcccgcgcgttgcccgatgccagagatggtctgaagccggtgcaacgccgcatcatctatcagatgggccagatgaatctcaatcctgatcgtccgtatatgaaatcggcccgtgtggtcggcgaggttatgggcaagttgcacccgcatggcgactccgccatctatgaggcgatggttcgtcttgcgcagccgtttgcgatgcgattgccgttggtggatggccatggtaacttcggttcccttgacgacggtcctgcggcctcccgttacactgaggcgcgtatggcccaggcagcgcttggtatgaatgccaatatcggtgagaataccgttgatttcacgccgaattacgataacaagctgcaggagccgactgttttgcccgctgcgattccgaatctgctggtcaatggcggttccggtattgccgtcggcatggccacgaatatggcgacgcataatctgggcgaggtggttgccgcggccaagcatctgatgcatcatcctgatgccacgttggaagagcttatgcgctatgttccaggtccggactggccaagtggcggcgtgatcgttgggcgtaacggcattcgtgaggcgtatgagaccggacgtggcgcgttgaccacgcgttcagtgacgcatatcgaaaatgtgacggcccgtaagaaagccatcgtcgtgacggaactgccgttcatggtggggcccgaacgagtgctggaacgtatttccgagggtgtgaagaatcgcaagctggaaggtatttccggggtgatcgacttgacggatcgtcataacggcactcgtcttgtcattgaaatcaaaaccggtttcgatccgaacgccgtgcttgcgcaactgctcaagcacacgccgttgcaagacaatttcactatcaacaatgtggcgttggtcaacggccgcccgcacaccatgggtttgaaggaaatgcttcaggtgtgggtggaccatcgtcgtgtggtgattcgccgtcgtagcgaattccgtaagaagaaggcgttggagcgtctgcatttggtcgaaggccttctgcttgcgatggtcgacattgacgaagtgattcaggtgattcgttcgtctgacgatgctgatgccgcgaagacgaagctgattgccgtattcgatttggatgagattcaggcacagtacattcttgacttgcgtctgcgtcgtctgacgaaaatgagccgcatcgagcttgagtcggaacgtgacgatttgaagcaacgtatcgaagagttggatcgtattctcgcttccgccgaagcgctcgacaatgtggtgatctccgaaatggatgaggccgtcgccacgtatggcacgcctcgtcgaaccgtattgctggatgaggatgccgatggtaagcttgtgcctgttgtggcgcatggtgatgatggcgtgtccgcttcggctatggccgcagcccgtgccgccgcaacggtctcttccgcagcagctgatgttgccgcagccgctaaggcagcgacgaaggccggtgaagacaatgcggccgctgtggcattgcagattgacgacgaaccatgtgcggtgatgctgtcggccacgggtttgatcgcgcgaacctccgaagatgcgttggaacgttgggagaatcgttcttctgccgacaaacgtgtgagggacgatcagattatttcgattttccctaccaccacacgttcctcatatggtttgatcacatctgccggccgtctgattgtggcgcatgtcgtggagttgccggttgtgtctgcggatggtccgctccatgtgactggcggcgtccatgccgaagagttgatcggtatgacggaaaataccgatccgattcgcggcgaacgcgtgattgctgcgattgccatgccaactgccgatgattccggtgatcatgccgcagaacctgctcctcttgcattgggcacgcgtaatggcgtgatcaagcgttggaatcgtgagtcgcccaccacgatggattcatggagcatcatcgatttgaaggatgacgatgaagtgctggctgccgctgaagcgcgcgatgaggatcgactggtgtttgtttctaccgactcgtctttgctgacgtttgatgcgaagaacgtacgccctcagggccgtaccgcgggcggcatggcaggtatccgcttggctgaaggctgctcggttgccgcgtttgcggtgattcccgccaacaaggtggcttggaattacgaggagggagacaatggcctgttctccgcgtctggagccgtggtgttgacggttgccggcgattccgaagcactgccgggcacggagaatggttcagcgaaggtaaccccgttggagatgtacccgacaaagggtcgcggtaccggtggcgtgcgttcgcagcgtttccttaaggggcaggatacgttgatcctcgccttcgtgggcacatatccggtacatgcttccacggagggcggtgccggcgtggaattgccgaagccggatatgcgtcgtgacggttctggtacggaactttccgcgccaatcgccatcgtcggctgacccattgcaatgtgacgtgcccgcgttttgcgaagtttggaatcgtttaggattccgttcgtaggacgcgggcattgttgttcctgcgttttcgtccgcgctgtcactatgcattagcgatgatgatctttttcaacagtaaagtttcatgccttgcggactatcgacgaaacctgcggcgtaaaggatttgccggtattcattgcgtgctttcaatgatgttccgttcatttcgctgaagctgatgctgccgctgggttggcgctgcaatacgtaggcaagttcggcgcatgacggtcttaatattgtttcgtctgcggtgaagctgacaattttatggctttttggtacggagaacagtaccggttcgccttgtttgagcacaatgatggacccggatctgcgtgctggtttgaggtaatcctgttctggccaggcgattgcggaaccagtgagattggcgggatcgatcacgtcgagcgcaacgcaggattgactgtgccattgcgtgtcgctgcgcagcgcgtcgacggtgtctcgttccgcgaattgtgccgcgccaaaacctttcacgaacatgcctcggaccagtgtgccatgttcttccattcgtttgagtaccggatagagcgctgaaaatcctccggcaatccgttccttgtcaaccaaaggagcggcaatcacgccgtatcggtccagtaatgagtcgatgagcgccagctcacgctcctctacacttgccgtatgcgccatgccaatgccggtatcgctgttttcgagcatgcccggctcgataacaccgtctagtggtttgtttggcataacggttcgcccgtcgccacaagatactgcggaccataatccactcagcgccaatggtgttggaggacgcatggtgacgcgtctacgcgcggcacgacggggtgcgcgaacggttttgcctccgtgcagaagcgctcgtactggtgcgaacgaactgttcgtcattttcccctgccataccagtgaccataaggcttcttcgaactgccgctcgccccatgccggaaagatgatttcgcccgtttcggggttcacctgcgcttcggcatgctcaagccagatggtttttgtcacggctgaaagcagttgaataggaaatgctccgccaccgcttaacgccgttaacacggcatccggcatggtcaacgtttcattatcgttcagcttatccaccgccgattcaggctggttgagcagcaaggaacctgctggatagaaggcgatctcaccagcttctttggcgttggatccacttgctttcgaaccgacccacaccacatccgacgatgagatgagttcgtcgagcatactaggctgatagtcacgcacacgtgccgggaataccatggactcccataccgaagcgttcaggaacacgccttccaactgctcgatgacacgcatcagaccatcaacgccttcgtagcgttcacctccaacagggccaacgccctgacgattaagcagaaacgcctgatagacgctcggatcgaccggtttgacggcctttctggccttggcaagagacaatgctcgaatacgccggaaaacatccttgtggagccattgctgaatatcgttcttttcggaagtctcacctgaatcagtgaatcttcccttgatgagttctcctcgggcatccagttcatcaagcgcatgcaccgcctgagccgcgtcaatgcccagttcggcaatcatcttgtcagcggtgaatggtccatgcgttttggcgtatcttgttacgcgcccgctgatatcttcttcggcgagatcattccagaatgttcgcccagcaagctcgccctccacttgtgtaatagcttcggcgtccaacaacgatgccatatccgtgcttcctagaagccgttcgagcacttccagatccatggacagcaactgcgtgcttcgttcggcttggggcacgtcatactggtacatcaccgatccgacgaagccgaacagcatgttctgcgcaaacggagaaggtgtttcagtagttgcctccgataaaagtattgttcccgcatgcaggcctgtcataatcgtgcgtaatgccggcaaatcatatacgtcctgcaggcattcgcgcgcagtttccaacaagagggggaagttcttgcaagtacgagccgcattcaacagttgcgcggccttcaaccgctgctgccagagaggcacacgcttaccgggacgtgtgcgcggcagaaacagtgatctggccgcacattcgcggaatcgagccatgtaaagcacgctttcgccaacttgcgtctcaacagtgcgttgcaattcgtccacgtcgaatagcaacagctcacgtgtaggcaaatcgccgtaaccgtccggcaatcgtaaaacaatgccatcgtcgaccgcgtacacttgaccgtcgaaaccaaaccgctgtttgattcgagtggtgatggctaacgcccaaggctcatgcacgcgcctaccatatggtgaatggatgatgatgcgccaatctccgccttcatcccggcaacgctccaccacgagatcacgatccgaaggaatcgtaccggtcgcttcacattgctcgtcaagcagtttggcaagattgcttatggcattatggtcgagaccatctcgctccaaacgttgcgcggtctcacggttgaactgtgcttccaatacagtctgagccgtattctgatcaccattctttgctggttcacgcctatgcaatccttggctgagctcacgcgtcaaacgcccttgcgccaatccgaaaccataatcacgcccatcctgatccccatgccaaaatggcaagcgcgcggtgcgcccgggagcaggaaccaccactaccctatctcgtgtgatctcctgaatctgccaggtggaagtccccaaagtgatgacatctcccacgcgggattcgtataccatttcctcatcaagctcgcccactcgccgaggacctggaccagagccctcttctggaagcaccaccgcgtacatgccacggtcgggtatggtgccgccactggtcaccgccaagcgttgcgctcctggacgtgcggaaatcagctttgcctcttcgttgtattgcagcggtggacggaatgcggaaaagctctcactgttgtaggcgcccgtcatcatgccgatgacagcgtcgaacatagaccggtcgagattttggaaaggtgcggaacgacgcacaagctcgtaccaatcgttcgtggaaagatcttccatggccgcggctgcgacggtctgctgtgcgagcacgtccagagggttgcggggcatatgcaatggttctatagccccttccctcatgcattccatgctggttgttacgccaataatctgttggcgggttatggggaagaacaacgcgtgcgagactccgccgacattgtggtcggcacggcccactcgctgcaatcccgatgcgatcgacaatggggcggccacctgaaccacgagatccaccgaccccatatcgatgccgagttccaggctggaagtggccaccacgcaacgtaattcgccgcgttttaactgttcttcgatctgtttacgtctatcttttgacacggacccgtgatgagccatggcaatcgcatcaatgtcttcatgcgattcaaccagcatggtggtggatcctaccaccgagtcatagtgcccggcaaattgctcgcggccctccggtgagcccaagtcacggtgctcactcagatcagttgccaccgtgccctgtttcgactccgcatacatgtcgttgagccgtgcggtgagcttctccgccagtccacgcgagttgacaaatatcaatgtggttcggtgccgcaacacctcgtcgagaatggaccgttcaatgaccggccataccgaaccgcctgtagcgctggtgtcgagcatattgcgtaatggttccacggcttttaaatccatggccggaacagcgccggggttcaccaccgttaccggttgcgaaccaccgagaaaccgtgctacttcctcaacgggattaacggttgccgaaagccctatgcgttgcactggatgcccaatcaacttatcaaggcgttcgaggctgacagcgaggtgcgcgccgcgttttgtacctgcgaccgcatgaatctcgtcgacgatcaccgtctccacgctcgtcaatatgctgttcgccttggaggtgagcagcaggaatagtgattccggcgtggtgacgagaatatccggcggatggctgacgattcttcgacgttgttcaggtgtggagtcgccgctgcgcatggccacttcgacatcggggatgggcagctccatcgcctcatactgctgggaaattccctgcaatggcagttcaaggttcttcgccacatcagcgccaagcgccttcagaggcgaaatgtatagcactttgacgccacgcttcgttttcttgcgggagcctttccctgcagctttttgttccgcatggctcttggctgccgcgatttcgccatgaacatccactcctgcggaacgcgtcccgcccgccataagccggtcaagagccgaaaggaacgcacaaagggttttacccgaccctgtgggcgccacaacgagcacgttctcgccggaatggatggccggccacacctgctgctggacttcagtgggccgactgaacgcatgtttgaaccatgccttggtcggctctgaaaacaggttcaaacattcgtacatacgttcgatgatcgcattaccgcaagacgttattcatcttcgtcggcaacccattcgagcacatctcccggttgacaacataacgtctcgcatatggtatcaagcgtggaaaaccgtatcgccttggcccgcccgttcttcaacaccgaaacattgaccggcgttatgcctatagcctccgccagctcattgacgctcatcttccttttggcgagcatcacatcaaggttcacacgaatggccatatcagatcaccgctgccagttcatcacgctgttcgatggcctgcatcaacagcgagcgcatcaccaccatcaacagttcgaacgccgcgatcagtagaagcgccgccactccgaccgccagcacgacgtatggaaacatttgcccgtcaacccccatcgcagccatcagaaagcgtgaaggcgacaaccagatttgaccgaccatcacggcgagcaccagcatgccttcaatccccgcatatacgagaatgtgattcacccaacgcatggccttgccggaaaagacatcacgtttttcaaccaaggtcagcaatctccacagcggcaccaacgcgaactcgaagcaagcgacaatcagcactgcggcaaccgcatacagccaatgcatcgagtcagcgtcggcatacttggaagcaacgccagcggatgccgcaatcgcactgaactgcagtccgagacagcatattgcaattatcacaatcagcacacgcaatacgccaatcaccatggaacgtttcgctgcggaattcggcatgatatccgtctccttcaatccaataaacctgaatatcgataataatctatcgatattcgatatgcaaatcttgtgaaagtatgttagtcgatatttttctatcgtttttcgatatgtacgatgacgtccaacatatctcagaaaggaatcattatcatgccggaaccagccaacacttccccatcgcagacttcgcaatcccaacaatcatcgccattaccagaagcacaagaaacccaagaaacaccaaaaacacaagggagccagccaacacatgaaccatccgcgcatcaggaggaacaacctttggcgaaacccaaaatcacgcgggaagaaatagcgcaacgccccctcaacaaacgcgcggtcatcaccattggcgctgcatttctcatcactttcgcattcgaccgtctgatctgcagcatacctccgacatggcttatcggatatgaactgccggttttctggatcatctgtgctcttaccgtaaccgcgctgcactggaaaaccgcacgaaaacaagttcttgtttggcttgttttgggaagcatcgtcgccattggcgtgtggaatacactcgctcagtcgacctggtgctattcgagaaatgacgagtacgcgctcaccacgcaattcgttcaaccggcgttgcttatgctgcactgtcagctggtcaacgggcgttacgatgttcgccgtccacttcaggttgcctggaattggcttaccggctggttgcagcagccgtttattcacattcgcgattttgcggaaccgttttccgtcatattcgcaagatttgcagtcgcgtcgaagcaacgttcgaaagcgcgcgaaatcggcattgcgctactgatttccactccattacttctgacgatcgtaccattgctcatcggagccgatcaaatagttcaatatgaagtgctgaacgttttcagtgatttcaacccgatgacgatcactctgcacatcatgttcatcgtgttgccgtggcctttgctgttctcactgcttattggactcgacgatgaacccacttccacgcctccggagcaacgattctccctcagctcggtaactgcgttcgtggtattggccgtgactttgactgtgtacatgctgttttgcatcgtacagatccggttcctgttcgcaggattgttcaccgatggttcgatcgcactgccagacggattgacctatagcgaatacgcacgcggcggattctttcaactgctggcagtcacggccattaatgtgacgctatttggtttggcgatcgcactcgcgccacgtacgcgcatgctcaacgcggcactggtagcattgctggcgttaaccgccgtcattctagcttcggcggcgcttcggttaggactgtacatcaacgcatacggtttgacttggctgcggtacctttcggcgtcatttatcgccctgcttgcgatcgcgattctgctatgccttattcgcctgaaaatacgacaactgccattggctgcaaccatgaccgcactgcttatcgtatggtacgtggcgctcggcttcagcaacccgaaccatatatgcgaaatctacaatgcggctcatggtatcgcaatggcaatggcgacaacaccgtatcagtcgatggtctgaccagcgcactttttacgcaggctctcgtgcatgatcatcatcagcaccaggaaagccaacatgtacagagggaaccacagcacactgatatgctgtgcgatcaagccgaataccggcggcatgcacatcgagccgacgtatgcgcatgccatttgcatgccgacgatcgcctgcgatttgtcttcgccgaaatatgccggcgtggaatgaatgacgcacgggtagatcggtgcgcagccaagaccgacaatcatcagtcccataatggtgccgatattgcgaggcagcggcagcaacatgatgacgataccggtcagcaccagcgcctgccccaggcgaatcatggccggatcattaaacttcatggtcagaaaaccactcgccaagcgacccacggtgatgccgatgcagaacaggctggcccacatagccgccgtggtcttatcgatgcccttgccaagcgccatgtagctactagcccacagcatggccgtctgctccaatgcgcaatagcagaagaacatcaccaggatttctttggcgccacgaatggcgagcacacctcgcacaccaagcggtttgcgagtttcatcattggccgttccgtcggattcgccggaaacttcgcccgtctttacctcggaacgcttcttccacagtggcagactgaaaataagaatggcggtgagcacaacctgcagtatggagatataacggtagccccacgaccatccttggccggcgcccaaggcgaatcccatgatgtatgggccagtcaacgcgccaatgccccacatggcgtgaagccagctcatgtgacggctctcgtagtggatcgccacatagttgttgagggccgcgtcaacgccgcccgcacccaagccgtacggaatggcaagcagaatcagcacccaatagttaggagcaacggaaaagccgaacaatgccaacgccgtcaacgccacggaaaccgcagtgaccttgcccgcaccaaaacgcaaggtcatacgatcggaaagcaacgcggaaacaatggtgccagcggaaatcgtcatggaaatgccgccagcccacgaaatgggagcacccaaatcgacactcatcgtcggccatgcggcacccagtaccgcatccggcaggccaaggctgatgaacgccacataaatcaccgcaagcaaaagattaaccacgccctactccttcttgatcggtagccgcagaagacaatatccgccattattgtaagcacatatagctaccaatcggtaactacttgattgcactgtctaccgtagaatcttcaatctttaccacacgggatcgcataccatcttcactaaaaaataccctccgaaacatcttgacgtagcggaaggcgagctgacgacaacctcgatcaggtatcgatcttcgaacggtcgaaatcgtcggcattctcaacgatgaacgctttacgcggcggcacgtcatcgcccatcagcagactgaaaatctgactggcctgttcggcgtcttccatacggatacgacgcagcatacgtgtgcgtggatccatagtggtgtcggccagctggtcggcgtccatttcacccagacccttatagcgctgaatgtcctcgttatagctgatgtgcttcttatcaagatcagccaatttgccggccagctcatcgtcggaatacgtgtagatatactcccccttgtgagctccggtcaaggcgatgcggtgcagcggaggcacggccgcatacacgtgaccgtactcgatgagcggccgcatgtaacggtagaacaaggtgagcagcagaatgcggatgtgcgcgccatcgacatctgcatcggtcatcataatgaccttgttgtaacgtgcttgctcgatgtcgaagctcgctccggagccagcgccgaccacctgaatgatcgccgcgcattccttgtttgacagcatctgcgacaacgacgccttctgcacgttgagaattttacctcgaatcggcagcaacgcctggaaaccggaattacgcgcggctttggcggtgccaagtgcggaatcgccctccacgatgaacagttcggccacatcgtcattgcctggctggcaatcagacagtttcggtggcatggatgccgattcgagcgcgttcttgcgtcgcgtcacctctttggtcttacgtgcttggatgcgggcgtgcatttcgccgacgatcttttcaagcacgcggccggactgttccttatagccacgtttggagccggtgatcatctcgccgaactgcctgtcggtcattttgctgacgatcggcttgacctgcgcggtgccgagcacatccttggtctgaccttggaactgtggttcggcgatacgcacagtgacgacggcaaccagacctgccagaatatcgtcacgttcgactttcatgttggaatctttgagattcactttgagcttacgtgcattgtcttcgatggctttgcgaatctgcttggtcaggcccaacagatagccatccacatgggttccaccgcccggggtttccaccacattgacgaagctgcgcatggtggtgtcgtatccgttggtccaccgcatggcgatatcgacggcacaatttctcgtaaccttctgcgcgtgcagttcaccgccatcgccaacggcttgggtttcctcaacataggtgtcttcgccagtgatacgccaaatagcggaaaccgcttcgcctttggacaggtaatccacgaaatccttcacaccgccggtatggcagaattcctcgatacgggagtgggtatacttcgatccctgaggttgtgccgcaacatcggcttcctcgatctgctccgcagcttcctcgtgcccggcagcgtcatgttcagattcatcgctttcggcaatttcctgcggttcatcacctgcagcatttgcaatatcgtcgacttccagcatttcgtcgactgattcatcgccggtttccggaatattctcatcgataacagtgattttcaaacccggcaccaggaagctggtctgcctgacgcgatcaatcagctgctcgtagctgaattccgcggtgtcgttgaaaatctccggatcagcccaataacgaatgcgagttcccgtggtcttcggactgaccttgccaatgatttcaagctcagtcggacggtttttacgcgtgcgtttgaatggcgcatccggagatgggtgctccggatcagcatcggtatacacaccaggatgaccctgatggaatgacatatgatgcgtcttgccgtcacgatccacttccacgtcaagacgggagctcaacgcgttcaccactgacgagcccacgccatgcaaaccgcccgaggctccgtacgaagagttaccgaatttcgcgccggcatgcaatttggtcaacaccacttccacaccggtaagtttggttttcggctcgatgtcaacagggataccgcggccgttatcggccacttccacggaaccgtcgctgtgcaacgtcacaacgatatgattgcagactcccgcaagagcctcatcgacggaattatcgatgatctcccacaggcagtgcatcagaccttggctatcggtggtgccgatatacatgcccgggcgcttgcgcaccgcgtcaagaccttcaagcacggtaagactacctgcgccgtaattgtccttgtatttcgccattttcctcattctgacttgcagttttgcttcggttttcatccataagaacgtcttgtagacgtaagaagtcgagaaattcgatattcttaccgaatttctcgacttcattcacctcttgtttcaatcactgatcaaggaagtcacgcagcgtctgcgagcgagacgggtgacgcaacttcgacatggtcttcgactcgatctggcgaatacgctcacgggtaacgccatacacgcggccaatgtcgtcgagcgtcttgggctggccatcttccaagccataacgcatcttgatcacgccagcctcacgcggagacaacgtttcaagcacctgcctgaactgctcctgcaacagcgagaaggcaaccgcgtcggacggcgcgatggcgtcggtgtcttcgatcagatcgccgaactcggaatcgccatcctcacccaacggcgtatgcaaggaaatcggctcacggccgtacttctgcacttcctgcaccttctcgacaggcatgtcgagctcgcgtgcaagctcatccggcgtgggttcgcggccaagatcctgcagcatctgacgctgcacacgagacagcttgttgatcacttcgaccatgtgcaccggcacgcgaatggtacgcgcctggtcagccatggctcgggtgatggcctgacgaatccaccacgtggcataggtggagaacttaaagcccttcttccagtcgaacttctcgacggcgcgaatcaaaccgaggttgccttcctgaatcaaatccaagaacagcatgccacggccggtgtaacgcttagccaacgaaaccacaagtcgcagattggcttccagcaggtggtccttggcccgcctgccatcgttcgcagcccacttgagctcacgcttgcgtttgaagtccatctggtcggattcggtgtccagcaggtgctgggcatacagaccagcttcgatacgctcggacagatcgacttcctgttccgcattcagcaggctcacacgaccgatctgcttcaggtaatccttgaccggatcagcagtcgcacccgccgcaatcacacgacgcttcggattgccggatggggtcagattctcatcatcatcgtcatcacgcaccacgaaagcgcccttttccttaggctcttccggctttttgcgttcttcctcatcctcgtcgtcatcatcttcaggttcggattcctcgtcgtcgtcgaggtcatcctcgtcatccgaatcgacgtcatcgagatcggcgtcgaaatcgtcaagatcggcgtcgtctacctgagcgtcctcatcgtcaagtgcatcatcctcgagcggctcctccttcttggcaggggcgctcttcttcgcggtagtcttgcgaggggtcttcgttgcggtggttttcttcgccgcactcttcttcgtggaggccttgcgcgtggcggctttcttcgtggaggtggtcttttcggtcagatcagcctgttccatgcttgccgtcgtttccttggtggccaaacttatcctcctattgatcctgcctcgaagcgtataccacatggacccacttctggcaagggcaaatcgtcaactatgtgagtaaaccatcttgcaaggacgattattcccgcataatgaggccttcacgcgcaagtcacgccactttacggcgtgttgccttatgtttccgacgtccaggcaggaccaatacgtcgttcaaccgccgagcatacaatcgccgccagcgaacattgatcatctatcgcgagcgcgctgatggctgatgccatggctccttcctggcccatccaccacatgatgtagctgatcacggcgaacggctgcgcccgatatgtcttcggaatcatatcgataatgtcgaacagcatgttgatcgcctgatcgcaacgtttcatatcgggtctggctaggggatcacggaatgaatcgctgagcagctgttccagacgctgcgcattacgagacagcttgggtctttcggcgaaactcatgagaaagtctcggtcggcgtatcgttcgtcaacgatggcggaaatgagaaatacgtcacgaatggacagcatccgattgatgcccaccgtagtccgcatgatcatattccggtcaagaccgcattcggcatggaattcgccttccgaatgggaaacgctctcgtccgatgcctgcgcaagcgcgtccatccatatgaaaagcggttcacgaatgaacgaacgcactgtttcgcccacgccgtcggatctgcaatccctttcgaatcggctgatggcttcttccatttcagtcccggtgatgcgtccggttttgttggttgtcattattctgccctccttggcatggtctatcggcttcctcgctcgccgcttatatggcactatgcccgatgagccgatgcgatgccgcttttttcgaggcctgtggtcggaggatggcttcttcggcgtttcgcaaaatgatttcggtactgcaactattgcaatcattgagatttggtcttgtcgaatgcctgtggataactgttggtatgactagctcctccgatttggaacagattgaatcacgcattgtttcgttggtgaaggatttcgcattccttcatgcggacgattcggttgcctcctcttgcaggcctattgccgacatggtcgccaagcaggcggtcacgtcaagtgagggtggcaagcggcttcgcgccttgctgacgttggattcgttccgcgcattcgcttcggaggatgtgcgagaacgtgatttcgacgcgcttctcgatttagcgtgcgcggtggaagtgttccagaccggtgcgctggtgcatgatgacatcatcgatgattccgatctgcgccgtggcaagccgtctgcgcatcgcgcattctccactggtacgcatagcgaggccatcggccatggcttgggcatcatgctcggcgacatgttggccacggcaagcgtggacatcgcggacaaggcagcttccaagctcactcatggttccgatgtggtcgcggcattgctcaacatgcaccgcgaggtcgaagtcggtcaagtacttgatttggccgtagagctcaatccgttggacgatccagacgaactggtggaagcttcattgaacgtattccgctggaaaaccgccagctacaccaccattgccccactggaattcggcatgcttgccgcgggtataggcaaagacgatgcgaggaagcaggcattggcagtcggcttgcctcttggattggctttccagcttgcagacgatcttctggatgttgtcggttcgagcagcaatacgggcaagcccgttggaggagatatccgcgaaggcaagcgcacggtgcttctagccgacgccatcaacgcggcgaacgacacgcagcggcgagagctcatcgacatgtgggaggccgattcgcgttccgaaactcaagtaaaacgcgccattgaactatttgagcaaacaggagccatcgaacgttcccgcggtagaatcgcggatttgtggaatgaatcgacaacagctatcgaaacattgagcctttccgaataccacgagtcactgctcatcgaggcctgctcacgtttcgtgccaagtattcacgtccaaacacgcgcgtgacacgcgacctgcgtgttttccaaccaacatccggacaggacgcgcgttcgttgcacaatccgcaaacctctgcttgtagactacaagtgggaacacgttcgaacgtgagttgttttgaagaaggaaccgtagcgatcaaccatgagtgaagctccacacgcccctgaaggtcaggtcatcgagggccggtatcgggtcgtcagcagaatcgccgatggcggcatggccacggtgtaccaagcggtagacgaacgtctggagcgcacggtcgccatcaaaatcatgcatacccagctggcgcagggaccgcaccgggaccagttcgtggaacgattccatcgtgaagcccgttcggccgcggccattgccaatccgcatatcgtgcaggtgtacgacaccggcgaattcgacggtctcgattatctcgtcatggagtatgttcacggcgtgaacctgcgttacgaaatgaaccagcagggtacgttcagcgttcgagagacgttacgcattattggcgagacattggatggcctcgcttccgcacatcgtgcgggcgtggtgcatcgcgacatcaagccggaaaacatcttgcttaacgaccgtggccatgtacagatcaccgatttcggcttggctaaaacggtatcgcaggccacactctcctccaccggcatactgctgggaacagcagcatatctagcaccggaaatgattgagaagaatcaagccacacctcagggggatttgtattccgtgggcatcatggcttgggagatgctcgccggcaacgtgccattcacttcagataatccagtaacactggtattcaagcatgttcacgaggatgtgccaagcattgccaccgcttgcaaaggcatcaatgaaggcgtggccgcattccttgcccatctcacggctcgcgcggtcgaggctcgtccagcagacgcatccgttgcgttaaccgagctgcagcgtctgcaatcgacgcttgcggtcagcgattggcagtatcgtcttcccccggtagacgtcagcgcttccgacagtgccgcgcccgcaaataacggtgcgccaaccaatgtcggcaatcctgttcctcccgctcccccggcaccgccgacgcagcaattcgatgatcgcacacgcaagctggacagggtcaagacgaacgcaacaaccgtcatgccggtgcagcaacagaacatcgatccagaagcgacgacacgtttctcgctgccggcagacggcatcgtcaatagccttgacaatgccgtcgacagcgctgcatcgcaatcccccatcgcgcaaagcgacgaatccggcaatactccaaacagcaaatccgcgaaaaagcgtcgcacaccgctcatcgtcgcaggcgtggtggcgctgctgcttgcatgtggcgccggcggttgggcatggtggtactatcagggccccggcagctattggaccatgccccagccggatggtatgacatgcgacgcgtccgcagcatgccccatcaccaatgtgaagtggagcgactacgagagtctgctcaagatttccgatatcgaatatgaggtgtcggaagagtatagcgattccgtggaggaaggcaatatcatctccaccgacccggcgaatgtcggcgatcgcggcagcaagcgtcgtagccagaaagtcaaggtcgtggtctccaagggagtccggcaggcgacggttcccgccgatattctcgacgcgaccagcgcatccggcaaggatccaatcaacgcgctgaagaaggctggattcgataatgtcgagcagaccgcggcttctgatgacacgtattccattgacgtgcctcaaggggcgttgctgtcgttaagtgtggatcccggcgccacattgccgcataatacgacgatcaccgtcacggtgtcgcaggggccaaagccagtcactatgcccgatatcgtcggcaagacgaaggacgaggcacagcaggcgctggatgatcttagactcaccaccaattggacggaatccttcgacgacaagattccacaggggcaggtgatttccgcttccgtcaacaacggtgatacgttgcattggggagacagcgtcgacgtggtggtttccaaaggaccggaaaccataaccctgccgaattatgtggggcagaaagcctctgacgccaaagccgcattggaaaaactcggattcacggtcaaggtaagttcgcagctcacgttggattccaatcaagacaagaaggtcgcttcgcaggatccggtaggtggcaccgaagtgcgtcttcgcgacgagaacggcataccaaccaccatcacattgaagatgtattcctcactgttctaaaaatgcattacctgctttgccaaacatcatggtataggcataaggaaagccccggctcgtgtagtgtcgtgccggggcttttctctttggtttctcagctgttcgcctgttcggcggctttctgagccttaagctgttccttgactttctgagcgtattcgttcacgtattcctgaccgctcatcttctgaatttccatggtcacgcgatcagtcagcgtgcgcaaatcgtcgtgcgtgatctggtcggcgggcttcttctccacggcaatcggttcgccgtagatcactgtggtcttgcccttaccaggaataatctgaccgggcttctgcaactcgcgagatccgataatggcggacggaacgattgggcatccggtttcaaaagcaagtcgcgcagctccggtatgacctttatagaggcgaccgtcagggctacgcgtgccctcaatatgaatgccgaacaggtggccgtcttcgaggatttcacgcgcgtggttcaatgcgccaagcgatttcgacccaccggaacgatccacggggaacacgccaaccgaagtgaaccaccacttcttgaacttgcctttgatgcccttgccttcgaaatactcggctttgcccatgaaatgaatcatgcgcggacaagtcagcggcaacagcgcgtcatcgatgacggcaagatgattggctgcgataatggcaccgccttcgcgcggaatgttttcaagtcccttggcagtcggtcccatgcggtggatggcgatcggtcctaggcctttgacgaaaaaccagtagagcatttttcacgatcctcctagcggatggccatccgcttgattacagttatcagtatgactgacctcaacaatagcaatgccgatgaagaacgcccaaatgccgcgccgaatggtggcgaaggggcttcttcaaatgcggacgatttggatgccgcatgggctgaattcgcaagttcgcatgccgacgatttgcaggccgtggagcattctcgtagcgcgaaacgttttgaaaagcatgcgcagcgccgtgagaaggaggcgttgctttcgattcaggatttggatcagggcacgttcactgatgacactccgcaaggtcgtggaccgcgcgatttcactggttccagctggttggacaccgatagtgtaatggatcgttacggtgatgatttcactcctccgaatccctccatcggtcatgtcaagatatcgaagttggtgttttgggtgcttttgatcgctggtgtcgccggtatcatcgcatctgcattcatgcctgctttggctgggattttgggatcgattttcggtgtgtgcacgttgattggcgctgctggattgatcgtacagcacaagggacatacacaaacccgccgcgatgttttcgatgatggagctcgcgtatagcaacatatggagaagactgcatcagctacgtcttttgtgctcttctctgtgatatttgtcgctgcgatacgtataaggcgtgtctcgtcgttgagtgttttgacgagacacgccttatacgttcttatgatctgctatttcgccgaatatcaagctttcttggactgggcggcggtgatccactggtcaagcagtgccgaggccttgcctgaatcaacggtttcttcggcaatggcataggccgctttgaatcgttcagtcaggctggcatcagctggcacctgatggccgtccgcaacaatcgcggatgccgcgttgagcagggcggtagtgcggaaaggaacgtccttgcctgcaaggaagtcacggaacagctgagcgttgagctccggctctccaccctttaagtcagccaccgtcaccttgtcgagaccaagctccacagtcggatcgaattcactctcagtgactttgccgttgctgaactcccagatggacaccggaccagtcggagccatttcgtcaagtccctcgcttgacgtgtacaccatgccggtctgtccattagccgcatataccgcagccatgatcgggctcattgcgcgattggcacagcccaccgccatgtgcttcggcgaggccggattggtcagaggtccaagaacgttgaatacgcatggcatgccgagcgccgcacggacaggtcccacgaagcgcattgccggatggaatgtgcgtgcgaaagcgaatgcgatgccgcattcgttgccgacctcagcaacctgttccggttccagatcgagcggcagtcccagcgcctcgaagcaatcggcagtgccgcacttggaagaggctgcacgattgccgtgcttcacgactttcgctccggctgcggcagccaccaccgcgcccatggaagacagattcaccgtcgcggcgccgtctccaccggtaccgacgatatcggtggtctcaccgtcgatatcaagtttgatggcatgggagaccatggccttggccgctccacgcacctcatccggagtcaagccaagctgctgctgggttgccagaaccgcaccgacggccgccggattagcgttgccgttcatgaggtcatcgacgaaccactcggattcctcggcactcagatggtcccctccgaccagcttggtgaggatcgacttccatgtgatttcagccatgatgccctccttgacgcttcagcatgtcacgttgttgatacgatatcgccgccattgtaaccgttctacatttcatggtttttcaacgtccatatcacgaacaggtaattgcagaaaagcgctcatcataaacaacacagacattttcaatatctatcttccgcatatcgggcaacgagcatgaaacaaaaaggcggtctgcgaaaaatccgcaaaccgccttcattatgcgcgaatcatcagagcatcacacgatatgtcactgttcgttctgtccgtggcacatcttgtacttacgaccggaaccgcacgggcactgggcgttcttgccagttcccgggaaggtgcggccatccgcccacggagagcgcaattcctcgctcttcgggcgcttattggcaggaaccttgccctcagcatggctgatcggctgcatgcctacgatgccaggctcattcttctgttcttcggccagttcgtcgatgacggtcttctcggcctcatcgtcggtttccggctcggcaggagcggtttcaccggtcggctgcgcttcgctatccaggcccatcaccgcttcggcggcgttcacggcctcttcctcatcggattcggtttcggcgtcttcggtggtggcgacacgatcgatgtcaacgtggaacagcagctggatggtttcctccttgattgcttcaatcatggagttgtacatctgatagccttcgcgctggtattcgaccagcggatcgcgctgacccataccacgcagaccgatgccgtccttgagataatccatctcatacaggtgttcgcgccacttgcggtcaagaaccgcgagcacgacacgacgttccagctgacgcagaccctcttcaccaagcttggcttcgaagtcggcatactggtcctttgcgtcggaaacgataagctcctgcagggctacgatggccttgtctcccttgaacttggagacagcgtccttggcggcttccggatcgacggcaatcgggtacacggcgttcagagccttgaacaggccttcccaatcccaatccttcggcttgtcagaacccttgttggcgcccttgatgtagctcaataccgtatcgtcgatgaacttgaggatatcctcgtggatgtcttcgcccttgagcacagcctgacgctcggcgtagatgacggtgcgctgcttgttcatcacgtcatcgtacttgagcacgttcttacggatttcgaagttgcgggattccacggccttctgtgcggtgcgcacgcccttggaaacgctcttcgcttcgatcggctcgccttccggcatgcccttggccataacgcgggccacgagctgggtgttgaacagacgcatcagatcgtcttcgagcgacaggtagaaacgggactcgcccggatcgccctgacgtccggaacggccgcgcagctggttgtcgatacgacgggattcgtgacgctcggtaccaagcacgtacaggccgccgagttcaacgacctcttcatgctcgtccttgacctgctccttgatttcggccaaggtgcccggccaacgcttctcgtactcgtccggagtgtcatccggagaatagccttcggacttgagcttcgcatcggcaaggaactcgacgttgccgccgagcatgatatcggtaccacggcctgccatgttggtagccacggtgacggcgcccttacggcccgcgacggccacgacggcggcttccttgtcatgctgcttcgcgttcagcacctggtggggaatgttggcaacgtcaagcagggacgacacgatttcggaggattccacggaagcggtacccagcagcaccggctggcccttcttgtggcgcttggcaacatcgcgcacgatggcggcaagcttctccttcttggtacggaagatcaaatcgtccttgtcttcgcgaatcatcggcttgttggtcggaatcgggagcacgcccagcttataggtgcccatgaactccgcggcctcggtttctgcggtaccggtcatgcccgacagcttgtcgtacatgcggaagtagttctgcagggtgatggtggcgaaagtctggttctcagccttgacttccacgttttccttggcttcgattgcctggtgcagaccttcgttgtaacggcgtcccggcaggatacggccggtgtgttcgtcgacgatgagcacttcaccgccagtcaccacgtagtcgcggtcgcgcaggaacagttccttggccttgatggcgttgttcaggtagccgatcagtgcggtattgttcggctcgtacaggttgtcgatgccgagataatcctcgatcttgttgatgcctggatcgagaatgccgacgaccttctttttctcgtcgacctcatagtcctcgtcacgggtgagcttgagcaccagacgtgcgaactgacggtaccaacgggtcacgtcgccttcggccggaccggagatgatcaacggggtacgggcctcgtcgatgaggatggagtcgacctcatcgacgatggcgaagtggtggccgcgctgcaccagatcggacttttcccacgccatgttgtcacgcaggtagtcgaagccgaactcgttgttggtgccgtaggtgatgtcggcgttgtactgcttgcggcgctccggcggtttctggttggtgatgatgcagccggtgctcatgccgaggaagcggtagacacgacccatcagctcggcctggtagcttgccaggtagtcgttgacggtgacgacgtgcacgccctggccgtcgagtgcgttcaagtatgccggcagggtcgccacaagggtcttgccttcaccggtcttcatttcggcgatgttgccccagtgcagcgccgcgccacccatgagctgcacgtcgaagtggcgcaggcccaaggtgcgcttggatgcctcgcgcacggtggcgaaggcttccggcatgagcttgtcgagggattcgccattgtcgagacgctgcttgaacttggcggtctggcccttgagctcttcgtcgttgagcgctgcaatctcatcttccagcgcgtcggtcgcctgagctacgtgctcaagcttcttgatctgtcggccttcgcccattcgcagggctttgtcaacgatatctaccacaatcactccctttgtgtatgcgagttatctcatctgagattagtcactgtttaacgatttccgaaaaacaccgtccattttacgtaactttcagcttgttgcggccttcttccattcgacacaccaccttcagacatgaaaaagaggcccgcacatacactgcgcgagccccgttcggtcagattatctccctatccaacctgttgcacgtcttacttcgccacattctccggggtgtcgatctcgaagacgccatagctccagccgtgacgatggtagacgacggacggacgaccggtctccttgttcacgaacaggaagaagtcatgtccaatcagctccatctcatacagcgcctcatcgatggtcatcggctccgcgatatgcagcttgcgacggatgacaatcggggtgtcgcctacttggacttcgacggactctcccggacccagctcagcggcgacggcttcggccgggctgttattcggcacttcgaccggctcctcaacttctggagttggctcgacgacaccaagatcgaccgggaccggatcgctgtagccacgacgatgatccttgcgacgatcacgggtgcgacgcagacggagggtcagcttgtcgagcgccatgtccagagcgctgaactcgtcggcgctggaagcctcggcgcgcaccacggtacgacctgcgatgacggtgatttcaacgcgcttggcggtgtcggcctgacgcggattgccctcgtgcgacaacacaatctgaacacgctgcgcatccggggcgatagcggtcacacgattcatcttgctttcgacaacgtcacggaacctttgcttaatctgcgtatgacgtccggtaacgacgatttccatgtggacctccctagactcaagcggtgttacccgctatatacggaccaaacagctgcttcgctgttcggtagtcaacattgtagccgcaacattgtgatttcactgaaaagttgacgcaagaaaaataaagtttttttgattttcctttcgtccgttttcttgctatcataatgcatttgagacctcttgatggccgcgaccgatccgtcggttgaggaacttccgggctccatagagcacgatggcggataacgtccgcccagggcgacctgagagatagcgcagcagagaacagaccgcttatcggtttcgaccggtaggtaagggtgaaacggcggtgtaagagaccaccgggccactggtaacagtcggccgcatggcaagcctcatcgggagcaaggccaagcagaaggcgtttgagggctgctcgcccgaagccttcgggtaggctgctagagcctgacggcaacgtcaggtcgagatggatggccatccgtgtctgaggcacgacagaacccggggtataagaggtctcactcccttatcacaccgaccgattcccgtggcgaaacagtgtttgaaaaccgcataaccactatgcgaatcagtcgtttcagacgaacaattcctgtgcgattttccgcagaacttcaggattatggcctttccgcccaccagcactccagaaccgtcttttacgcacctcgacatccaatccagcagtttttcttgctgtccgacgtcccagctcccatgcagcctcggcgaacacgccttgggattcggcctcatcgcacacacgttgcgcgagctggcggtccacacctttgcgtttgagctccatgaccgctcccctataccccatcagtcgtgatgtgcagtaccgcaccgcggactgggcgtacgcctcgtcgtcgatgagacggacccgaatcagtctgactatcacatcgtccaccacctcggaggcataccccttgccgatgagtcgctcccgtatcgcgcctgacggacgcggcgccgcatcaagcagccgaagggccgcctccctgcatgcatccaaatcattcggatcgtcaggaatccgcgacacgccgactgcgacacgccctgcgtgtcgtgcgtgtcgcgcacgcctcggcgtgtcattgccgccaatggacggagttcggtcgtaatcgaattcggttcgaccggcctgcggccgaccaccgcaggaaagggcaaggcccccagcctcggatgataccggctggaggccctgctgttcaagaaatcgctcagcgctgatcatacgtcacgccttgccggctgacttggaagcctttgccgcgcctttggctgcttccggcttgccagcatccgctttcgccttctcctcgcttgtggcattagacgcagaagcctcattaccatcttcggcaaattggtcggtgggctcaatgagaccaaactcagccttcaccttattctcgatctcttcggtaagctccggattgtctttcaagaattggcgcacgttctcacggccttgacccagttggtcgccaccataggtgaaccatgatccggacttcttcacgacattgacctgcaacgccatgtcaagtacggaaccttccttggaaatgccctcgccgtacaacacgtcgaattcagcggtcttgaacggcggagccatcttgttcttgacgaccttgaccttggtgcgattgcctacagcctcatcaccattcttgatggtctggatacgtcgaatatccatgcggacggacgagtagaacttcaacgccttgccgccggtggtcgtttccggattgccgaagaacacaccgatcttctctcgaagctggttgatgaaaatggcggtggtgcccgcctgagccaaagcgccagtcatcttacgcaatgcctggctcatcagtcttgcctgcaaaccgacatgactgtcgcccatttcaccttcgatttcggccttcggcaccagtgcagccactgaatcgatgacgatcacgtcaagcgcaccagaacgaatcagcatatccgcgatttccagcgcctgctcgccgttatcaggttgggaaacaatcaacgaatcagtatcgacgccgagcttgcgcgcatagaccgggtcaagcgcatgttccgcatcgatgaacgcggcgacgccaccgtttttctgggcattggccaccacatgcaacgccagtgtggtcttgccggaggattccggaccataaatctccacgatacggcccttcggtaggccgccgatacccaatgccatatccaatgccagcgatccagtaggaatcacctcgacatcctgctcgggacgatcgcccaatcgcatggccgatcccttgccgaaactcttctcgacctgcgcgagcgccgtatcaagcgcagcctgacgacgcgggtcgatgccgttcgcggacttgttctgtgcggctccctttgccgcgctcgtctgtgccatgactactccttttgctgactatgacgaatggtggcttcaccgtaaggccacggcattcgttcccgcaaatctaacggccgttgtggtcggaggatatgcgatctaacgagtcataaccaacatttcttggaaaatcaacgttttcacgcgatctgaagaatttggaaacagcccgtctaggttgttgtctgtggataactatatcccaacatgcgaacatctgttcgaagaggcgtgttgtgttcggaaaacgtctcagcgcaccggcataggaggcgcgttatggtccttgccccaacgctgggaatcgggaatgcccatctggtcgcataacacattccagaccactcgcggctcctcacctgcgccaagcgcgtccaccgccgtcatgccgccaagacgatcaagcacctggtcatgcgccagcgctcgaccatagctacgaccaagcacctcttcaagtaactgccaaaattcacgttcctgcacgtgccccagtgtacacagacttgaatccatgtacaggcacgaaaaacgcccggcgaacaatcaccgggcgtcaaccttgcattcgaatcaggcagccacagaatcgagatagtcagccaccatgcgaagcatctgggctgtggacagccccaaggactgcgcgatggacgacagcagttcggaactggcctccttctggccgcgctccacttcggaaaggtaccccaaagacaccccggccttttcgctgacctcgcgaagcgtcttatgatctcgcgtgcgcaggtcgcgcagcacatggcctatggcttcacgcagcgaaacctccttagcctcatcgggctgttcctgagcgtgcggcacagcatgcgtgcgtacccgatcggagtcctcttcctgccacattcgcgtcaatgcggtctgacgctcatccttggcctttttcgcagcgcgcgcacgaagcacctgctgctgcgcgaacatcacagcgcgccgctgagccggcgtaagctccctgacacgagctccggcagcctgcgcagtcgcaggagccatagccttgagttccctctgctctttggtgagtgtcatcatttccattcatcagcccctttttcgtgcgtacgtctgtccactatggtcaacactcatctttgtggattattcctgtgaatccgctgaaagctccctcagcttttgcagaatacaatgcacgacgccgcgtcgcacgctctccctatctccctgcaggcgaagctcaaaagcctccgttcgccgagagcgaacacctccgaacccctccggcagggaacaaccgacatatgcaagacctgccggtttatttccatcaggtccaggccccgccactcccgtggtcgacaatccaataacgcagtcgccatccccctgctgccgatacagcctcgccgttccggcagccatctggcgggccacttcaggatggacagccccctcgctgcgcagcagttccgcatctacgccaagaatcgaggccttggcacgaatgtcatacgtcaccgcggaaccgagaaaaaccttcgacgctcccggcacgcgcacgaaagcgtcggccaacaggcctcccgtcaacgattcggcggctgcgatcttgaaatggttggtttcgcaatatgcaagaacggccgcagccaattcatcgcattgcgattggttggcggcagccgtctggtccatagattcagtcatgaatgccttacttggtttcttttccggacttgcccgcggacttcttacggccgccgaacgtattgaccagatactcgccaccggaatacaggcagagaatcagcgcaagataaatcagcgcatacgtgatggtgtagtagacggtcatccacatcggggtgtcgttgaccccttccggcgccaagctccacataggcagcataagcatggccagaccaatgcactggcagagcgtcttgtatttgcctgcctgggatgcggcgatgaccttgccgcccgtgtcgatcacaaagaagcgcatgacggtgatgccgatctcacgaatcaggaacagggcggtcacgacccatcccagcaccggattgccaaattcgttgaagatggcggcaacgatcagtgtgccgcaggtgagcagcttgtcggcgatcgggtccatcagcttgccaagttcagtgacttggttgtatttgcgggccatccagccgtcaagcttatcggtgcatgccgcgatgatgaagatgacagcggcaacccaacgcatggtgacgttgtccacgccccacgcgccggctttggcgtacagcgccaaaaacacgatgaccaaaatgatacgagagaaggtgacaaggttcggcggcacgttccagccgtcaagcaacgatgatttgcgttcttcttgcttttccataccgttcacgttaccctgacacttctacttgcttaccaatttgcgtttcatacggagcgttccccagtcacatcgccgcttcggaatccgccgccgaagagactcccgaactcagcgacgaggtctcacccttgatgaaggcgagcacctgcggcaagtcctggggctgcaccaacacctcgcgcgccttggacccttcggacggccccacgacgccacgtgactccagcagatccataaggcggccagccttggcgaatccgacacgcagtttgcgctgcaacatggacgtggaaccgaactgcgaggtgacgaccagttccgccgcctgcagaagcacatccatatcgccgccgatgtcttcgtccggctcaatggccttcttgtcggcttccttggccatttcctcgatatcctcacggtaatgtggcttgcgctgggtgcgtacgaattccacggcacgtcggatctccgactcgtcgacccatgcgccctgcacacgcaacggtttggcctgtcccatcggcaggaacagcgcatcgccctgtccaatcagagtttccgcgccagtggagtcgagaatgactcgagaatcagtggccgacgaggtcgcgaacgccaaacgcgaaggaatgttcgccttgatcaggccggtgaccacatcgaccgatggacgctgggtggcgagcaccagatgcacgcctgcagctcgtgccagctgcgtgatgcgttggatggagctttccacatcattcttggccaccatcatcagatcggccatctcgtcgacgaccaccagaatgtacggatatggagcgaccttgcgcttcgatccggcaggggcatgcaccttgccggcgcgcacggcagcattgaagtccttgatatggcggaatccgaagaattcaagatcgctgtaacgagcatccatctccttgaccacccattcgagcgcctgcgcagccttcttcggatcggtgatgatcggcgtgagcagatgtggaatacccgcgtatgccgatagttccactcgcttcggatcgaccatgatcatgcgcacctgatccggcgtcgccctcatgatcacggatgtcagcatggagttgatgaagctggacttaccggaaccggtggcgcctgccaccagaagatgcggcatcttggtgaggtccgccgttacaaaatggccttccacatccttgcccacgcctgtgagcatcggattcggatcgtttctcgccttgtccgaacgaagcacatcgccaagcaccacggtttcacggtcggtgttcggtatttcgatgccgatggcggacttgccttcgatcaccgacaggatgcgcacgtcggaactggccaccgcgtaggcgatgttcttctgcagattggtgaccttctccactttcacacccggaccaagctccacctcatacatggtcacggatgggcctcgcagaaagccgatgactttagcgtcgacattgaactgctggaatgtgaccgtaagagcgcggatcacacgatcgttctccggagtgtgcacggcatgcggcgcgccttgcttcagcatgccgagatcaggcagatggtaggggccctccggaatctcagcggactcgtcggaaacgccctctccgttcgatccggcatccagatcgttcacgacctcattggtcgccgcatcgaccatgacctgcgacccgttggacgtgccgtcctcgtcgatgacggcccacgggtcccctacagccacgccaacggatttgatctcgtcggacgccgcctggccggcaaccgtcggaatggtttccgggatctgcggcatggtgccgctcgccaaaccgattgggtcagaggaaagggaacgcaccacaggcgtctgcggcatggcgacggttccaccgaaatcctgagcggaatgttcgtcggatgaaatgctgcgcggccgcgagacgctctggtatggttcgtcaagcatggtttccgccgtttcgccatgccgttcggcagcattacgaaacgcctcatcaccgtcgtaatgatcgagtccgtcctgagcgccctgcttcttggatttcgatgatatccattgctttatgagggagaacggcatcggcttcttcttttcagccgccacatcgtcggctccattatgcgccggcacgccttctgcgaacgacagcgtggtatctcctatacgcacttcgttcgggaattgctcggtctcgtcatcaacctttttatttgcaccgaatccaaaacggaccttcaatgcacgtactttgtcgggaatctcttgaacccctgtattggtaatcagcaacaacgagaacaaaatgacgaccacgaaaataacgatggcgaacgccttggaaagcccccatgccagcgggcagccaagcacatagccgagcagacctcccgcattctgcagcaacgccatgtcgaaaccttgggcgtcggacgcgagcgccgcatcgagtatggagcagacggaccacagaatcatggaccaccccgccaccatacgcacattgccgcttttgcgcttggtctcatatatgaggctgaatgccaccagcgccaaaaagaccggcaggatgacgctcatcagaccaaacaggccggaagccaaggcgtggagcatccggccgaacacgccctgcacccggaaccattccgaagcgcagaacattaccgcgagaatcaccagaataaaacatgcgatatcacgtccgtacttggtcaagacacccatcacaggcgacggctcgaccgcgtccatgaccttggtctcgccggaacgtgccttgcccgtggaccctttgccgccggatttcgtattggaagatgctgttcgtgccataacggtcatgattttacccatgggaggcgccatgacatggcacttcctcgaatcgcacacattttctaacttaagtgaacacgcaatttcactgattggattccgccaagatcgtcaccgtcaatctggaggccaagccggagaagaccgtggataaggtggaaagcttcgacgaatacggcagcgggagtttcatttcaggcgaggtctccgagatgatgctgggtgtaggcgtccgcctgcgcgtctatggcgtcataggcacctgcatcggcatgttcgatgatggccatcgcattgtctagcagcgccggattgagcgcttggagccagtggatgcgcgggtcacgaccgaaccatcccatctgcttgcgtgccagacgcttcgttttctgcgcaatgtccatgaacgtgtcgttcaggtcacgcaacccgtccaaatagtcgacgacctgctggtaaccgagcgctttggctgcggtgatgcccagcttgggacggatacgttccacttcttcgatgaatccgccttcgagcatctgcttggtgcgaatatcgatacgacggtccagttcctcacgcggcagatcgagaccgatttgcacggtggggatgacgtaccggtagtgcggaaggcttgccgaatagggtcgtcccgtcacttcgatgacttccagcgcacggatggtacgccttggattgtgcgggtccatgcgcgccgccgcttcgggatccttggctttcagctcgtcgaacaacgcgcccgcaccttcggttttttcccgttcctcaagcgccatacgtatttgcggatcggtgccggggaaggagatgtcgtcgatggcggcccgtgcgtacaggccagagcctccgacgaggatcggacgcactcccctggcctgtagttcggctattttctcgcgggcgagctcttggaacctcgccacggacatggcgtcgtccggttcgatgatatcgatgagatgatgcctgacctgcgcctgctcctcaaggcttgccttggccgtgccgatatccatgccccgatacatctggtatgcgtcggcgttgatgatttccgcctgttcgcctttgcgcgccaacgctttggcgacggcaatgcccaacccggttttgccggatgcggttggtccgacaatggatacgaccttgcgctgcatcgcaggatcggcgtctcctgttttgtctgttttctcaaaggtctgttcagtgtcgaacggcataggtctgccccgccttcggatcgggatcggcgatgaggttgtgacgcccagcgtgggtgatggtggcggtcacgaaatcgcctacctgcggcatcggctcgccttcgggcacaccgacatgcacgagcacgccggttttctcgcgcccggtgacacgatgagtcgcggcgtccttcttgccagatgcgccggtgaccatcacttcgacgtcacggccttcgaaggttttgagattttcttcggtgatgcgttcctgcaatgccacgagtcgttcgaaccggtcttggaccacgtcgtgcggcacctgctccatttcggctgccggagtgcctgggcgcggcgaatagatgaaggtgaatgcggacgcgaatctcgcctcttccaccacacgcaaggttttctggaagtcctcttcggtttcacccgggaaaccgacgatgatgtcggtggagatctgcgcatccggcatggcctcacggattttacgcagaatgtcaaggaacttcgcggaacgatacgaacggcgcatggcgcgcaggattcggtcggatccggactgcagcgggaagtgcagctggtgcatgacattgggcgtttcggccatggctgcgatcacgtcgtcggtaaaggcggcgggatgcggcgaagtgaaccgcacgcgctccaatccttcgatctcaccgcatgcgcgcagtagcttggagaaggcgaaacggtcgccgatgccgtaaccgaacgagttcacgttctggccgagtagcgtgacttccttggcgccttcgtccacgcactggcggatttcggcaagaatgtctcccgggcgacgatcatgttccttgcctcgggtggtaggcacgatgcagaacgtgcaggtgttgttgcatcccacggagatggccacccagcttgacaccttcgacgcgcggtcggtgggcagctggcttgggaagtagttgagttcctctttgaccttgacctgcgcatggccttcgatgcgcgcctggtcaagcagctgaggcagggagccaatgttcttggtaccgaacacggcatcgacccaaggggccttttttgcgatcttctcacggtcgagctgtgccatgcatccgccgactgcgatctgcaggttcggacgctggcgcttcagttcggcccacaggccgatggtgccgtacatgcgttccgccgcgttttctcgcaccgcgcatgtgttcatgacgatgaggtccacgtcatgatcgaggtattgttcttcggtggcgggcacatagccatccgcttcgagcacacccgcgatgcgttcggaatcgtgcacgttcatctggcatccgagggtgtgtacgtagaacacgcccttgcctcgcgtggcggtgtcttctgtggcaggttccgcaagtttcgaggcgcgctccgcctcggtcatcatgtcttcgttcatagcattccatgctatcggcagggattcccatcacgcgccgtatgcaccttaatgcagcgtggcatgcggtggaattggagggatgacggcgctttcagcgctttttcagtttttccgcgctccttttgggtacactatggaaccgtgatacttgatagacagagccgcatcaataccagtgaactgcaagcacggctgaagtcggtgactttcgacgatggtccgttgccttccgatcagattaccgagttcattgatcaaatgcaggtgtatgagggcgcgatgtatgagatcagcaccaaactggagattctcgattccgagttccaggtgcgtttctcccataatcccatccatcacatggaacgcaggttgaagtccatcaattccattctcggcaagttgaggcgcaaggatctgccgttgacggtggagtcggtcaaggacaatctgtttgacgtggcaggcattcgcgtgatctgcaattatcgcgatgacgtgtattcggtgtcgaattatctgtccgcgcagaacgatattcaggtgttgcgtgtgaaggattatattaagaatccgaagcagaatggatatcgttcgctgcatgtgatttatgcggttcccgtttttctgtcttccggaccgcattacacgcctgtggaggtgcagttccgcaccatcgccatggattattgggcgagtttggagcatgcgctgcgttataagacggatttgcctgacgcgaagctgtcggagcattcgcagacgttgcttgattgcgcgagaagtctgcagaatgtcgaagcgcagatgcagaacattcatcgcgatatcaatggcgcgccgcaggttggcgaggcccctaaggccggctgacgtctgccggtttgcgtttggccgcatgcaggagctggtcgatgggcagctgggcgagtatggtgcccacgaaaatgagcgcgcagccgaggtaggctcgagtggtcatgatttcgcccagcagaagcgcccctccgactgcggagaagaacgactcgagcgacatgatcacggacgctctggtcggaggcacaagttgttggcctatgacctgaagcgtataggctacgccagcggagcagacgcccgcgtagacgatggcgatccagctttgcgcggcaccggcccagtcgatggatccttcgatgatagagccaatccagctgatgatcgcggtggtggtgatctgcccgaatgaaagcaggatggggtccatgtctcgtccaaaggtgtctatgacgaggatgtgcccggcgaagaggactgcggtgaacagcagcaccatgtccgccagggtgatggatccgaatccgtcggtgacgcacagcaggtagaagccgataacggagatggcgacgctgatgatgacgctgaggtgcactcgtcgacgcaatatgatgaaggccagcagtggcgtcatgacgatgtatagagcggtgatgaagccggaccgtcccgccgatccggagtaaaggatgccgtattgttggacggtgcttgcggtgaaaagcacgattccgcagatgatgctgaccacgatgggattgccggcccatttcggcatggcgacgattgcgccgttaccgagggtgatggacggttttccctgggtttcacggcgtttacgctcttgttccgctatggtgctgcggcgaaaccaaagcaacggtatcagagaaatggatccgagggtgaatcgggtggctccgaagaacagcggtgttgtggagtccatgccttgcacttgcgacacgaatgcgaatccccaaatgagggccgccagtacgaggcatgccatgccgccaatctcttttctctgcatgagcacccaccgtaaagcatgtctttgaccaacggataaagcctggccacattctggtcaggctttatccgttacgttgaccgaggagcaatgccaataatgtcccatcaaaggctgaaagccaaatgacgcgtgcgtccccaaaacgcaccgaaggaaggcgcacgaaggtacgccggctgaggagcaatgccggggacgctccgtcatttggatttcagtcgcgattgccgaggagttggagaatatacatgaacatgttcacgaaatccaaatacagattcagtgcgcaaaggatggaaaccttcttgaccatttcggggccttgggcggaatactgttcaagcatcgcgcgggtggcttgggcgtcgtagacggtcatgccggcgaagagcagaagtccgatggcagagacgatcatgagagtggtgttgcctggggcgaagatcatgagaatcacttcggcgatgataagcacgatgaggccgacgaaaaggatggggccggccttgagcatgttgatcttggtggtgcgtccgaacatggtgagcgcgaagaagaagccggcgcacaatgcgagggaaataccgatggtgccaagatcgtaggccatgaagatggtgctgagggtgaagcccatgagcgccgcatacacgtagaacatgacatatgcggtggagaccttcattgtatggatgcgcgcgccaaggtagatggcaagcacgatttcaatgacggcgggggcgaagatgccgatgatgcccgtggtttggatgagtgccaggtacgcgccgctcatttgggtgatgatggcgaccacggcagtgacgatcaaaccaagggtcatgtgcgtgtatgcgctgttgacggaactgcgttcggcctgctcgtaggaataggtggcctgcacgttgactgcggcggtaccgttgggcgcgtaggcgtactgtggctgcgcattgtactggttgtactgttggttgtactggtattgattgttgaagccgttattctgggcgttgttaccctggggctgctgaccgaatgccataatcgctcctttttgctcgattgcgcatcacgatacggcattttcctgacgatttcatgaatattggcttaatctcatgatttcttcaaagcccgcataggtttcgcgttcgacacggggagtgtgccggacgcgaaagactgggacatgccatgtcagatggcgaacttgtacgtcactttggcggtgtcgctgaaatcgagaaggttcgtcacgtcgacggtgatttcggaatcgtctttaagcacatatccgagggttaccgtgccggttgctcctggctgcagttcagacagataggagccggaatcgtagccttccggattgtccaagtacacggcggtgtcgagttcctgaccgttttggaacactttcggattagccagcacggcgaaggagttgttcttatcggtagtgttggtccactcgtaggtgacgagcacggtcggctgattgttgtagtcgttgccggaacgcactgcggatacgattttgacgtgcatatcggtgagatcgccttccatgtcttgctcgcctttcgccttggtgtcggttttggtggaatcatcggttttggcgtccttatcggcgtccgccgacgaggattgcgacgtgcttgtgcccgtgatgtcgtcaagcgccttgctggcggccgattgcatggccaaggtgatgacgatggccaacaccgacagcaccgccgcgactatggacagggctttgccacgctttttgcctcggaacgtgcccacgatggccacgatcgccaataccgcgccgacgagtccgaagatcgccgcgatgttgttgatgattggaatgaagctcagcaccaagccgagcgcgccgaacaccactcccacgatgccacataccgtcgtgccttgcggagccggggacgacatgatcggcgcgggtctcataccgttcggcgctgccgggccgccgttgggaatcggagcattgttgaactcactcatgatctttttctttcttctcgaagtggtcggaacactttcgagcctacgggatcggcttcgttcccggtattggacgaaagtccattcctgcctgcactttggggcgcgcggcttgcgccatcatgcccgatagctcaatggcatgtttccatgagtatgccgataatgggagtcatgagcgtgatcacaaacccttccaccgccgaagtgccagtgcgcaccagaatctggtgcacggtgccgatggtggtgtgcgcgagtttcgcctgtctggcgcaggtgtctttcgcatcccaacagtatgcgcaggatagtgccccctacttgtggatgatcgcgtgcgtgctcgttgcgatcccttcgggtttgattcttctggctcgcaacagttacccgcaagccgtgttctggaccgcatgcctactggtggtggcgctcccctacgattcgctgatcgcgcttatggcgttgacttctctgcttgcgcggagacagggaaccaaagtgacgcttcgatcagtgcttgccgcggcgacaacgacgatctggtcccaggtgcgagacgctttgcatcctgccgaggcttcgatctggcatgcgatcttctccaaaccatataccggagttcggtatggcaataccatggtgatgcttgtcgacgaaagaacgatcatcgcgagcgccgttgtggttgccctgattgcggtggcgatcgccacattggccggattgcatattcgctcgcgcgcccttgcgcgcgtggccgaagcgaaggctcagtcggccaacgagcaggtgagcaggttgcggaccacgcttgacaatcagcagcttgccgatgcgatagccgcggaagcgcatgatacgttggctcattcgctgtcgttgcttgcattgaatgcgagcgctttgcaggccgagtctaggaaattgaaggctgaggccgagcagttgggcaatgccaatgtggctggtatggctggaaagatcgccggcactaccgaggatattcgcaggcaggcctccggcgcgttggatgaggcgcatagtgtgattgacatgcttcgtcatccggaggatgctcgcctgcagttggctgcgaatgatgccgaagcgtcgttgacccgtgactcattgctgcagttgattggcgacgcccgtgccgcgaatatgcggattgatacgtggatcgacgttcaacagctggggcagttagatgagtccatcggcgtgattgcgtatcacgtggtacaggagggattgaccaatgtgcgcaggcatgcgcctggcgctccggtgtcgttgcaggtcgatgcgaaacccccgcaaggggtgcatgtgcacgtcagcaatccgacgatgccgcaatccccctcgcatatggcagacaccaggaagggggccggtcttcctggtttggccaaacgcatacagcaggctggcggaacatgccaatacggttttgaccaacataacgtcttccaccttgatgtacgactaccatgggttgggtgagcaccgaacgcaaccatgacgagcagccgatcaccgtcggcgtgattgatgatgatccgatgatctgccagatgatgcgtctgattttggaggattattcctccggacgcatcagcgttgccttcgcctgcaccaacgcagcagacgccatcgaacatgcgtcgcacaatcctcctgatgtcgtgctggctgatatcgccatgcccggcatggatggcattgaagccactcgtcagctccgcatgcttcccgatcctccgcatgtgcttattctgacgtcgctgagtccaaacaacacggtggaacgcgccatcgaagcgggcgcggaaggattcgtatcgaaaacggacgctccggaagatatcatccgccgtgtggccgacgtgtgcgaaggggagccacagttcaatccggcaagtcaacggcagctcatcggcgatttgcatcagcaccagcctcagtcgcggcgcgatgaggcccgtgccatgctcgacgccttgccggaacgagaacgcgaagcggtgattctcgcggccgagggcttcaccaatgcggaaatcagcgagaaaatgttcatttcagaacgcacggtcaaagcgcatatttcatccgccgcagataaactctgcatgggccgcgtgcagatggcccgtttggtagaacgagccgacctgccgccacgactatgacatcatacactcgtacacttgaacacagagcaacgcaatgaggggaacgccatgtcaatcagcgcaacggaaaagcctttaggcaaaatcttcacttcggattaccggttcgtaatcccatcattccaacgcgcatatacttggcaaacggaaaacatcgcgcaactgatcaccgatctgcaggacgcatgccacgacccagacacgccgtatttccttggatcgctgatcctcgtccatgatggacagaccaaataccaagtcatcgatggacagcaacgcctcatctcactttccatcatcatttccgtgctccgcgatctggaagacgaccccgaactcgtggaaagcctcaacgacctcatcgtcgagccaggagacaaactacgcggcatcaaagccgaaccacgtctcaaactccgcgaacgcgacaccaacttcttccgcatgtacgtgcaggaaggcgatctggagggactgttcgatctgcgcgacaacgatatcgaatcgcacgcgcaacgcaacatcgccatcaacaccagacaagtgttcgacgaactcgcgaaaatgcccacacaagaccgccgcgcattcgcatcatacctcgtcaacgaagtcaccctcgtcatcgtaaccaccgacgatctcgccggcgcacaccgtattttcgacgtcatgaacatgcgcggagttcccctcaccgcatccgacgtgttcaaagcaagaaccatcgccgaaatctcccccgccgcacgcaacgcctacgcttcacgctgggacgacatcatggatccactcggcgacgacgcacagacgctcgaagaattcttcagcgacatccatctcatcatctcgcacaaagccgtctgcacacaactacttgaggaattccgcaaggacgtgctcaaaccattcgtcaaaaagcagaacgtcatctccttcatcgacgacctgctcgcaccctacgccaacgcatggcgcatcatcgaacacccgaccgccgccaacctgccagacaatatcattggccaactcgtatccctcaacgactaccaaaccaccgactggaaaccagtagccatgtgggcgctcgtcaactccgtacgcaacctcggcaatcccgacacacgcatattctccacgccgggcacacacactgccgcagcctcgcgcacgtcgaacaaaaacctcgaggaacctcaactccacgaccttgaacgacttcacgacgtactcgcggccctagaacgcgtaaccggcgtggacagtctcaacaggcaaaccccgctcaaccgacgcacacgcgcagccagcaccattcgcgacctcgataaaaaccacaccatccaacaaatccgaggattactcatcaccgacgaagaccgccgcaacgcgctcgcgcatctgcgtggcgacctgcagaccagtcccgccatgaaaaaactgcttctggttcgggccaacgagcagcgggccgggcatcgtatcacccgaccacgcagcctcaacgcgctgccgatcatgccggaacaggtcgcctccgactcatcgtttgcatcatggtctgaggcgacgcgcgaccattgggtcaatcgcatcggcaatcttgcgctcagtcaggctaatgacaagcagatcgcgggattggcatcctatacggaccgtcgtgaccgtatgctgctgtcggcgagttccaaacgcttcccgctcaccgccgagcttgccgacattgcggactgtacgccacaaaccttgcaataccgccaggatgaaaccattcgtctgatcgccgattattggaatatccgttacgatgccgagcgcaatgacctatccacgctcagtgaggagtcgttgcgagtcacggacacgtccacctccccaacatccaaacgcgtgtccatcgcgcaggtgctcgccgctggtctgctcattcccggtgagacgctggtatgggaccgaccgcgcaagggcgaacgttgggtggctactgtcaccgccgaaggcaagcttcgactggatgacggcagcgagtactccacaccaaccgcagcggcccgtgccgtcggtggcggttcggcgggattgaccgtgtggaagcgcacgtcgaacggtcagaagcttagcgacgtgtggaaggcctatcgcctacgcaagcgctgaaaacgctgttcgttttgatgagtttgccgtttatcgacggtttcctattggcatgcgagccattcgaccgcaagtttcgtacgattcgtaacgttcgttttcgcgagaatatcgctgatacgattgcgaaccgtgccttcgcttaaaaacagtttcgcagcgatctcacgattgtcgtacccctcggcgaccagttgcatcacgtcccgctcgcgctcagtgagattcgcgaaacgaccggaaaaacgattttccccgttatcgccagcttgcgaaacgtgacgctgcgtctgactcgctttattgacatgcagtttccgcaacacctgcgctcccataaccacctgtccggccatcaccgactgcactgcgggaatcaccgatgagacatcctgtttgatcaggtagcctttggtgccgatttccaacgcctcggcgatgtacgattcgtccgcgaatgtggtaagtatcaggattttcgcattcggatgggcgtcgacgatctttcgcgacgcggcaagaccgtccataaccggcatttgcacgtcaatcagcagcacgtccggattatcttcttcatactgacctaccgcggtttcgccatcataggccgtccatgcaatatcggccgtgcctgtcgctttgagaatcgtggacagcgacgagcatacgattggatcatcatcaacgattgcgactcgcatcatacgttctccttcgttgttgcggacgctgccgcatcatcgtccgttttgggaatggacacgaacacccgccacccctcatgatacgggccgcacaccgcggtaccgccgagcgcccgcgcacgctcctcgatatccgccaatccaatgcctgaagcatcacgcatcgtcgccgtacgcgcggcatcatggaactgacgaaaacgagcggaagactcccccatcataccgttgatgtttccttgggagccatcgttccacagggcgccatcatcctgtatgcgcagctgccataacgcaggaaaatcacgcaaggtgatatcgacattgcgcgccatgctatggcgaatcgtattgttcaacgcctcgcgaatcgtcgtggcgaaacagcgtgacaccgcggccggagccgcatcgatgccgttgctcaaggtgacgttcactgtactggaatcgtccaaaccatgcgcggatgcctcaatctgcgccacgaaatccgtgccttcgtctttcagatcatgcaccgcgccccgcaccaatgtcatcgcctcgcccaccgtgtcgtgaatctgcgcgaacccttgagccgcctgctcctgaccagaaacctgagccaccacttgggccgcttcggactgcatgatggcccgggtaagcatatggccgacattgtcatgaatctcgcgcgctatgcgtgtacgctccgcgagcgtggccacacgaaccgacgcggcgcgatcttcctcgctttccgccaattgcgagcgcagccggcggatctggtcacgtttggaatcctgaagccgcctgttctgccgggtgagcgtgacattgcgcgcgcacaacaggccaaccatgaatcccaacactacatgcaatgccagcagtacggcgatgagtgcagctcccatatcatccgcatgcgcgcctgcattacggcaacggaccaaggtcgccactacgggaatgatccacacccatcgtgcgatgaccgtcgtgatttgcatcgcatcgtattgcgacatgttcggcaattgcgaacgcaagccggcatggttccgtcccgcacggggttgttcgacgttctgtgatatggcgggcagcatggccgcgttgtatgcggcgaccggcatcatcgcgcaccatgatggcgtgaagcatgcgccgcaatccaacatcaacagcatggcgatggtccatgccgacgagcgcgcgtattcccctaccgcggcacagcatatggccagcaacgcgccgcataccagttcagccgatacgtctccgacgatatacaggtttgcgatcagcccgaacgtgaggaatatggcttgaagcaataatcgccgcatgccttcctccatcgtcgccgcttcttgtggttatgtcttaccagcgtagtgtacgttgccgccgttgcgggccatctttgccacgaaggtgacatttgtcatcttccatatggctgtgttgcgccaggtttatgacctcagacaccatgtcgtcgccgtttggtcggagacaatggaatcactatcgtaaacggcggttatcgctgttggaacatgtgaggtaaggagagccgatgagcgagcgtatggaaaggcacacaggtgagagctccagcagcgcggtcaaggtgtcgaagctggtcaaacggtatggggatatgctggcgcttgactatttcgatcttgacgtgcatcaaggtgagattttcggtttgcttggaccgaacggttccggcaagaccacggcgattaactgcattctcgcattgttgacgttcgatgagggcacggtacgtgtgtttgacgaaccgattggcccgaccagttatgcgctgaaacgccgcatcggcatcgtaccgcagaatgtggctgtgttcaatgaattgacggttgaggagaatatcgattatttctgctcgttgtatgtgcctgacagggcacgccgtcatgcgctggttgaggatgcgctggattttgtgggcttgcgcgattaccgcaggttccgtccgtcgaaattgtcgggaggtttgcttcgtcgattgaacatcgcatgcggtgtggcgcataagccggatctgattttcttcgatgagccgaccgtcgccgtcgatccgcaaagccgcaatgcgattctggagggcattcagcgtcttaaccacgaaggcgcgacggtgatttacacgagccattacatggaggaggtcgagcagatctgcgaccgcattctcatcatggatcatggcaggcatttggccttgggtaccgccgacgagttgaagacgatgatcgacaccggcgaacgcatcagtgtggaaaccgacgatctgggtggcttgcatcatgagacgggaacgcagcaggcattggaacagttacgtgcgctgccatgtgtgatgagcgccgattatgacggtcatgagttgacggtacgttgccgtaggggcgatcacaatcttcttgacgtgttgacgttgctgaaatccaatggcacgaatatcgggcatctttcctcccggcagccgacgctgaacgatgtgttccttgaactgaccggcacggcgttgcgtgactgacggaatcatggttcgaaaggtttgacattatgttgcagacattgctggtcaatctgaaattgcatttcagggagaaagcgcagctgttctggctgtttgcctttcccatcattctggcgaccatgttcaatggcatgttcggcaatatcgcggaaagttacgcattgcacacggttgacgtcgtcgtggtcaataacgacgattggcgcgcctctccgggcgcgcagatgctggtcgacggcatttcgtccgatactggcgcgaccggtgccgatggcgatcatgcgaaggtcgatgatgccggtgacgccatgccgaaactcatcaccgtcacggaagccgcatctacggaagccgcggatcgagcgctgcttgacgccaaggcgcagggcagactgtccgtcgacggtagtgggaaactgcagctggccatttcccaagccacgcaaacatccgccacggatgtgatggcgtcgagcagtggtctggatatttccctgacggtgttgggcaatatcgtggacttgtacaatcgcaacaccgccgtggtggccgatgccgcgcagcacaatccgtccgcgttgttggatgacgcgttcaccggcagcatcggctcgtcgagtgggttcacgaaggaagtgcagctgacgaatttcaagccaagcggcaccgcacgctactattacgcgttgctcggcatggccgcgatgatggccatgagtttcgcggtgaacgcggtatcgttggcccaggcaaacctgtcggcacttggcattcgccgttccgttgctcccctgccgaaactgcaacagctgctggcaggtttcctttccagttggatctgctcgttcctaagtctgaccgtggccatgctgtacattcgtttcggctgccagatttctctcggcggtcgtgaatgggccggcgtgggcgcgtgcttgatggcgtcattcgccacaagcgcgttcggcacgttgatcggcgcaatacagggtgtttccacgagtgccaagcagggattgtgcacggccttggcatgcacgctgtcgctgttttccggtttgtatggctcgttcgccatggatttaagcgatcagatagcgcagcatgcgcccctgttgagcatgttgaatccggcgcaacagattacgaatctgttctacgacattctgtattacgacagtttccgcccgttctttgccacggtgggcgtattggctgcgatgagcttggtctgtcttggtatggcgaccgttctgttgaggaggcaacgctatgaacacttgtaaagcagcactgcgcattctcaaagcgcgcaaattgtatgtgattatctacttggtgctgatcggcacgatgatgttttccatcagctggcagatcatgcgtggctccacagctgccagagcgacgacgtatgagccggaatccgcccgtattgcggtaatcgaccgtgatgacgacgccgagcatgtggctcaatcgttgcgttcctacctcgctttggacggtgagatggtcaccattgatgacgattccatatcgttgcagcaggctgtcgcatcgaattatgttgatttgattgcgattgtgccacaaggtttcgccgagcgttatctgcagtatgcggataacgccacggctacgcaaccgaccatagataccgtcgtcagttatgcttccggagccggatcgctcgcacagctgaaagtcaacgagtttctttcgctgacgcgtaccgcctatctcggtatgccgcaggcacagcgcacgctcgacgccgccatggcaacgacgttggatgctgccaccgccgatatgaaacagtcgcatatcgccttggtgtcctcggactctgaagacgacggcaccacaccgggctcatcggcattcgcgggcacgctcaaaaccggcttgtatccactgttgctggtcatgccggtatgcacgttcctcgtagtcagcacattcaacgacaacgaaatccgccgcaggctctactcgtcccccgcgcgtctggtgtcgttggaagcgcagcaaatgctgacatgcgggacgttcggtctgctggtatgtgctgcgtataccgcgatgacattcctgttgatggcactggccggagtgtcctttaccggcctgaatgccgtgaacgtaggcttgtcgttcgtgtcgctgatggtctacacgcttatggcgatcgcttgcggattcctgttggggtcatccggtttcaatgaaatggcaacgaacggtttcgtcaatgtgttcgctctgctggtcatgttcacttccggtatggcgttccccgtggatatgatgccagatcctatgatcatcatcggaaaactgctgcctggatggtggctctgctcatcgatagaccacgtattcggactgggtacggcctcctcgagcggcgtggactacggcgcgtgggcgtcatcaaccggattggtggcaatgttcgcggtagcgttcatctgtctgggcttggccttgggacgcattcggcgagcccgcccgacgttggcctcccccaccacaacgcagttggccaagtagtcgacgccaacactgtggcagccgcatggcgatcgcatacgacgtccacggtctacttgagcatattcctccggtaggctgtgggcgtcgtatgcatgtactgcttgaacgtgcgcgtgaagaatgtcgatgatgagaaaccaagttttttggcgatgtcggaaaccggcatcgatgtggtgtccagcatttccgctccagctctcatacgcacgtcattgacgaattcaatcggcgtctgatcgaccatctcatggaagatctgcgcgcatttcgtacggccgacggaccctgctgaagcaatctcctccagggtgatctgtcgaacgtaattgtgctgcacgtaatcaatcatcttgctcaaaatagcgatcttcggattcttcctgtcgtatttggaagaaccattcttgccatgttcgctcgctatggccgtcagttcacgcaccatcgtataaaaacagctgagcacggtcaacgatgccgtatcatcctttaatttcatattgtcaacggtggcgggatgcatggtctgggcagccggcatctgaccgaatttcgcatcatgcagccgcatcatgcattccagcaacgcggatccatgctcatcttcaggatcacacaccatgtacggaagccgttcgtccgccatcaacggagccacaaagcgttcataaaccatgttcggcatgcacatgcatgaagggttcagcagagtgcaggaaaattcgcaatcggtgccgtcctcggtgaaaccgtaatgcaattggcgcgaattcacgaaaatgccttggccttcttcaagacgaatgctttcgccgttcacgaaataccacatgtgtccacggatgatgtgggtgaattcgaaatcgatatgccaatggcattccgcgcgcatgttcggatactgatgcagcagcgaatgttcggtgaatgagaagaacatcggcgcatcatattgcaccatttccgcgccgttgggcttgcgtccccagttggtgaccggcatgaactcatatggaagacgaccgtcttgcgcaagttcaggctgttccgtttgttcgttttgtccgacctgcacgtcacgaacgtctaatcccatctgtcccatgcaataccccatcagtggatacggtaaataatacgaaaatcaagaacgataatacaacgaaatacagtgtcaacgaatagtgatgccgttgaatggaacatgatatgtcacgtcaatcgattgacgtaatacagcagaggaggcagcatggtgaaacccaccaatcatccggcacgcgacgaatgggagcgtatgctctccggcgaactgtatgtggccgatagtccgcaacagcaggaagcgaatatgcgcaagcgtcgcctggtgcaggccatcaacacgtccgaatatgacgcgttcaaagaacgtgacgaactgtttcacgaactgttcggcgcatttggagagggtggattcgtggaacccccattcaactgcgattatggatgcaacacgttcatcggcaagaatttctatgccaacatggattgcattttccttgacgtggcacgcatcaccatcggcgaccgcgtgttcttcggcccccgagtgggcctgtacacgccgtatcatccgatcgatgcgacggtgcgttcctccggccctgaaggcgctcgtccgatcaccattggcaacgatgtctggttcggcggcaatgtggtggtcggccctggcgtcaccatcggcgatgatgtggtgatcggtgccggatcagtggtggtcaaggacattccttcgcattcggtggcagtcggcaatccatgccatgtgatccgtgagatcaccgacgccgaccgcgaatattgggaaggcaaggcagcggaatatcacgcttggaaggattcgattcagtaaatcgttagttcacgcaccgcaatttcactcgggtgcgggcattggctatcatcgcccgcaccccatcaatgtatttctcgtacatttcctacacgcaccgcacaaccatcctcacatcatcatgcaatcttccatcacttggcgcgagtttcttcgacagacgttgacgctcgccctgcccatcgcgtttcaacaactgatgctggcgctgtcatcgtgcgccgacactcttatgctgacgaacgtcggtcaaaacgagctgtcggcagtgtctcttgccacgcagttccagttcattttcagtttgtgtcttgccgcgctcacgcttggcatgagtattctggtggcccagtattggggtgcgggcaacacgaatgccgtcgaacgtgtcttggcgttcatcatgctgtatgccggcggattgtcgctggtgtttttcgcattgacgctactcattccggaaacgttgatgtcgattatgacgaacgatgcgacactgattgccatcggctcacagtatttgcgggtttcgtcggtttcgtacctgttcatcggtttgtcgcaaatgtatttgtgtctgatgaagaatgtgggtgcggcggtcaccggaatgacggtaagcacggttggcgtgatcgtgcatgttgcgctgaacgcggtgctgatctatggttggttcggtttacccgcattgggtattttcggcgcggcgatttccacggtgatttcccgagccatcgaactggtgtggtctgtgcttgtagccagccgcaatggccgcccacgtttgcggttgtcgatgatgttgcatccggatgtggcgttgcagaaggatttttggaagtatagtctgcccgtgcttggcaatgagctggtttggggctgcggtttcaccatgtacaccgtgattatgggtcatcttggtacggatgcggtggcggccaattccattgcgaatatcgtcaaggatctgttggtctgtttgagtcttggccttggcaatgcgggcggcattcttgtcggtaatctgcttggccgcaatgctttcgatcaggcgaaggttatgggcgacaggctctgtgtactggtggcggcagttggcgttggaaccggcctgttgattatcgcggcacgtcctttggcgttgcagtgggcgggattgacgccgcaggccacgcgttatctgtcggttatgctgtttatctgcgcctattatgcggcatgcgggtgcatggccaatctgactatcgccggtattttccctgccggaggcgattcccggttcggacttgtctgcgatgcgagcgttatgtggcttgtcgtcgtaccggtcggtctgttggcggctttcgtgtggaagttgccggtattggcggtctatgctttgctgaataccgacgaatgcatcaagatgattcctgctttgctgcattatcgaaagtatcgttgggtcaacaatgtgacgagacagaccgattccgccgtagtatcaaacgcatgaaaaaccggtatcgacaaagcccgtgtcatactgcattgcgcagtgcgacacgggctttgtcacttgccgatctcaatcatgtgattatttatttcatgagattgcgcagcacatactgaaggatgcctccgttgcggtagtagtcggcctcacctggggtgtcgatgcgtacgaccgcgtcgaattcggttgcggaaccgtcgctatgggtggcagtgacatgcaccgtcttcggaataatgccattgttgagttcttcaacgccggcaatatcgtatgtttcagtaccgtcaacgccgaggctctcataggattcgcctgcggggaactgtaacggcagcacgcccatgccgatcaggttcgaacggtggatacgttcgaagctttcggtgataacggctttgacgcccagcatgacggttcccttggcggcccaatcacgtgaggagccggtgccatattccttaccggcgagtactaccagaggcacatcgtgttcgatgtagtctcgggacgcctcgaaaatggtggtcggcttctggtcgaggaaatcgtaggtgaaaccgcccggagtgacctcttctcccacggacgcgagcaactggttgcgcagtcggatattgccgaacgtgccacgtaccatgacctcatgattgcctcgacgggaaccataggagttgaagttcttcggttcgacgccacggtcggtcaggtacttgccagcaggactggaagccttgaacgcgccggccggagaaatatggtcggtggtcacggaatcaccaagcagcgcgagcacgcgggcgccatgaatgtcttcgacgggatccggtgtggccttcatgccatcgaagaacgtctgcttacgcacgtaggtggaatcctcattccacgcgaacagttcgccttctggaacgtcaagtcctttccaacgacggtcgccttcgaatacggaagcgtaatccttcaggaacatctcacggctgacggtaccgtccaccacggcggcaacctcgctattggtgggccagatatccttcagatacacatcattgccgtccggatcctcgccaagcggctgagtttcaaaatcgaaatccatggtgccagcgagcgcataggcgatgacgagcggcggagatgccaggtagttcatcttgacgtccgggctgatgcggccttcgaagttgcggttgcccgacagcactgaggtgacggtcagatcgttggcgttgatggcttcggagatttccggcagcagcgggccggagttgccgatgcaggtggcgcagccgaaaccgaccagctggtaaccgagcgcgtcgagatcgtcctgcaagccagccgccttaagatagtcggccacaacctgggaacccggtgcgagcgaggtcttgacccacggcttgggcttcaaacccttggcatgcgcgttgcgtgcaatcaaaccggctgcgatcatcacggacggattggatgtgtttgtgcacgaggtgatggatgcgatcgccacatcaccgttggtgatgtcgaagtcaccgcggaagtcggtggaaacggcaaccggctcctgcacggtcttgtccgtttcgtacgcgggcaaggtttcgacgaatttcgctttggattcagacagtttgatgcgatcctgcgggcgcttcgggccagcgatcgacggtacgacagtaccgaggtcgagttccaggtattcggaatactgcggttcgacgtagtttggatcggtggtgtcgccccacagcttgttcgccttggcatacgcttcgaccaatgcgatctgttcttcggaacggccagtcaagcgcagatagtcgagagtgacgccgtcgatcgggaaaatgccgcaggtggagccgaattccggacccatgttgccgatggtggcacgattggccagcggcaccgaggcgatgccatcaccgtagaattccacgaatttgccgaccacaccatgctgacgaagcatatcggtgatggtcagcaccacgtcggtggcggtgacgccttcgggaatggaaccaatgagtttgaaaccgacaacacgcggcaccagcatggagatcggctgtccaagcatggccgcttcggcttcaatgccgccaacgccccaaccgagcacgcccaagccattgacggtggtggtgtgcgagtcggtgcccacgcaggaatcaaggtaggcaagagtcttgccactgttttcttcgaccttggtcatgatgaccttggcgagatattcgatattgacctggtggatgatgcccgttcccggcggtaccacgcggaagttcttgaatgcttgctggccccaacgtaggaactggtaacgttcgccgttgcgctggtattcgatgtccatgttctgttcgaccgcgtcggcgatgccgtacttgtcgatctgtacggaatggtcgatgaccatgtcggactgcacctgcgggttgatgacctcaggatctcccccaagatccttgaccgcatcacgcatggtggcaagatccacaatgcagggcacgccggtgaaatcctgcatgaccacgcgggacggggtgaactggatctcatgactcggctgtgcggccggatcccaatccaacagtgccttgacatgatcatccgtgatgttggcgccatcgatgttacgtaccaggttctcgacgagaaccttcaacgaatacggcagatgatcgatgcccggcagatctgcgatgcggtaatattcataatccttgccgttcaccttcagggtgtcgagctggtcgtcgcgcacagacatgctacctccgagcttcttggctgtataacacagctgattattcgttgcctacgatacagccaagttaattcagctctggcgtgtcttcttaaagtatgggacaatgctcagaattttcggcaccaaacgcaaacacaccaagaacacgagtgccgaaagcaccattgccaccgtcgtcgcagccagcatctgcccggtcggcaccaccagcgcgaagaaattcgccaccggttttacgagcatgcctccgaatccaattgcggcaaaggccaataccaatatgccacgccacgaatgcaacggctttgccacacgcgcaagcacgaacactcccatcatgagcagaataatcgcgttgactccacgcagcatcgccaactgcgcacccgaatcctgcacattccacttcatgaatatcggcagcagccacgacgtggacaaaatcgacaatccaaccgccacaccgcagggcacagcaaaatgcagcacgcgtttcaggaatcctggaatataacgacgcgtgttcggagccaacgcaagaatgaacgccggaatgccaatcgtcaatccgcccacatatgtgatgtggcgaggcagatacggaaatggtatctgcgtcaacaccacacccaacgaaatcagtgcggaatacacggttttcacgaggaataggcttgccacacgttccatattggccatgacctgacgccctcgcgccaccacatcgggcagatgtgagaacttcgaatcgacaagcaccacctgtgccacggccttggtggcgggcgcagcattgcccatcgcaatacccagatcggcctctttgatggcgagcgcgtcgttcacgccgtcgccggtcatcgccaccacatgctcacctgcatgcaatgcctccacgatcgcctttttctgatcgggcagcacacgcccaagcacatccacgttttccagtacttgcgccagttccgtaatgtcggcaggcaattcacgcgcgtccatgaatcgtggttcatgttcgccagtcagatgcacttttcttgcgatcgcgccgacggttacaggattgtcgccggagatgacgcgacaacgcacaccctgttcacggaaccatgcaagcgtttcttcggcatcggcgcgaatatgttcggaacagcacaccaatgcgacagggcacgatgccggattgagttttggattggtttcgtaatcgtcgggcgctgcaccgtcgattcgcgcgaccagcagcacacggttgccgtcgttggcgagatcattgacttgtttgagtatgtcggcatggtcgccgttgatttgggaaagaatgacttccggcgcacccatcgtccatactgcattgccgtcatagatcgaactccacttgcgcgccgacgagaacggtactcgtgcctcgacagtgccgtccgcaaatccttgttcccgtagtccagacagaatcgcttgccctgtaccgttgggctgtccttcgttcgataggtcgaatagagcctgtctgacgtcatgctcattcacgttgccgcacataatgccggagcttcgaatatccagcaattccacggaatcaagtcggatggtgccgtcggtgacagtaccggttttgtcaaggttcaggcaatccacacgagcgagagtctccacggattccaactcctgcaccagcgtgttcttacgtgccaaacgaatggctgcgagcgcgaaattcagcgaggtgagcagcaccaggccttcaggaatcataccgaccacaccggccactgcggaaatgaccgcggaacgccattcgccggttgaaatggccacattccagccgccaacagtgcgtgcctgcgaccagatgagcagtacgcagagcggcaccaccaggaaggtcatgaatttcagaatcgtgttgatgcccttgttgaggtcagatacggttttcttgtagaccttcgcctgtgcggtaagtttggccgcgtaactgtgctctcctacggcgatgactttcaccaatgccatgccggagatggcggtggatccggagaaaatgtcgcagccttcgcctttgcgcacggtccgtgattcgccggtgagcatggattcatccagttccaatccccaagtgtgcacgatctgcgcatccgcgggtacctgttcgccggagcgaatccacatgagatcaccgagcacgatatcgttgtgcggcacttcaacgtctttgccgtcgcgatgcacaaggtaatcggaggccaccaaaatcgatagtttgtcaagcgtacgtttggctttcagttcggtacagatgccgataccggtattgatgatgatgatcagaccgaacaccgcatctctccacgacccggtgatcagcaccatgaccatggcggcaaaaatgatgccgttgaacagggtgaacacgttggctcgcacaatgtcgacaagagaacgcgaggtcgattctttgactgtgttattcagtccactttctctgagggcaatcacttcgccttgtgtgagccccgtctcttcgatgagaggcattgttcgactttcgctcataattgccagcctaccgtcacagtcctgttttctgggcaacttcttgtgaagcacaggtaaaaatcagggaattttcagggtatttcatcaaaagacgaactgctggtcattcataccgacatggtgcaaaaccatatcagtgggtaatcgtggttaccagcatttcccggtcgtgaggatcgttgttggctacggccacgaccgcgtcgtcgagtggtgtcgcgtcggtcatacgatcgttgaccgtcatggtagccgcatacagtttgttgtctttcggcacggcgataggattgagaagcaccactggaacgcccgctgttcttgcggtttccaaagcatcattccagttttcggcattggcttcgttcacgtcgattcctgcgatgataatgaggtcggccttacgttgcgccatgtcacgcacgccttgctgcgcggtggattgcgcgtccacagtgcccgagacggtaatgtacaccggcttgagcttaccggcttccatggcatccattgccatggaatcggcggtgacatcatccgatccaatcatggcgatggacaggctgtcacgatcctccatggagtgtgccaccgcagtatcgggagattgcgtatcccccaccgcggcattcgacggcacgcaaccagatagcgccgcacaagataacgcaatcgcggtcattccaaaaaacgcacgacgtgcgaataatggcatgctcactgctcgtgctttctgaacagcgccacagtctccacatgatgggtcatgggataaatgtcgaacgcgcgaatatccgccaattcgtagccaagtgacacgagggtggcggtgtctctggcgaggcttgccggatcgcatgcgatatagaccgcgcttttcgcttcggcttcggcaatctgcctgcacactttcgcgcgagcgccggcacgaggtggatcaagcaccaccacatctggcttggcgagatcattgcgtacgttggcaagtgttttcgccacatcgcccacacgcgcatcgacgttgcccagatgaatatgcctcaaattacgttgcgcgttccttaccgcggttttgccgccttcgacgctcaacatgcgtgtgcgctctgccgtcagcatggccaacggcagcgtgaacagacccgaaccggaatacaaatcccacaggcatgcggatttggcaccgtcaagctcgcctcgtaccaaatcaatcacatggttggtcaaagcgatcggcgcatgcctatgcatctgccagaaaccgcctgcatccacgttgtattcgaattcacggccggcaacagtcaccttttccgtaagctcacggcttccagcaaccacctcgccgttcacaagcacggcgtaattgtttgaaatcggcgcattatcacgaggttccggaacggatagacgaatctgggaacccggttcgaagttcccgtcccacacatgctcacgttcggccacttccagcaacgtacggctggccaacggcatggtatcaatcggaacgcgcacatgcgtgcctcgacggtgcatcgacggacgaccatcagcatcagcgatcatctcgatgcgagtacgccaatgcagacctcgctccgcatcgtcttccggcatacgctcaatgggcactttcacgtcgacatggccgagtcttgccatctgttcgcccaccgacgtggctttccatttcagttgaccggcaagcgacacatgcaccaggtcagcgccgccgacaccaccgcccatggcaagggggccagctaacgaccatattggatcagtacggtcttcgctcgcttcgagcacttccaccacttcgcccgtccagaagcgatcctcacgatcatgcggctcgtccaatgcgacacggaccagttcgcccggcaatgcgaatcgcacgaacacaacacgtccgtcaatatgaccgacgcaacgaccctggtcggcgtaccgttcaacgcggatggtcgattccatcagtgctcttccctcatttcggtagtttgtgctgcctcagcatcgtcttcagaaacttcctgcatcatcttatgtcggtgcattggcgtcgccacgatcagatacgagacccaaatcgcgagcgcccagaacggaatgcccatcagcagacgcgccgttcccagccagccgacgcgattgccaatatagagcggcacctgcacgatcagacgcagcgcgaacactccgatccacattgcggtgatgatggtataggcgcgattgagtgccttgtcacctcgccaatcggcaagccaagcacgaaaatgctcggtcggtaacgttcggatgaactcgatgaccaatcctaagccaggcactcgggccagcagtgaaatcgtcagcaaaacaacgtaaaaggcgttggtgaggaatccgaacatgtaatagttacgtgcctcgtgactgttccatgcccaaatcaggcagatacctactgccagcaagcctgataccgctcccatgacggactgtcgttggcacaggcgcacgatcacctgcagcacggccaacgcagcggacacgccaatggtcagttgcaaattggatgtgatgacgaacagtaccacgaacacgacgcccggcagcatcgattcgataacgcctctcggaccgccgatggcgtcgatcacggaaaaatcgtcagtattaccggcgtcagcaagcgcaccaagaccggttcgttttttcgcttcggtttcagccatacgtattagctatcggttcaagcggctcagcgcacttcggagaacatcggtccacgagacagcgtggtcttgacctcaacctgctggtcggagtcgaatggacccttcggcttgcctggaatctcagtcttctgctcaacctcttccgcagcggcctttgccgccttacgttcggctggagcgactggcggatgcatgggaataaggtcacgcggtgccaacggatcatcgcctcgttccaccacaatatcggcgaagaactggttcaatgcctttgcttcctcaccctcaggatcggtggcagccttgccggagaagatgccacgtagcatccaacgcggaccgtcgacacctacgatgcgggtaagcaccttgcgtccgcccttgacggtaaccggcaatgccagttcggtgccgaacacgccttcgacttccttcgcgtccttgttggcttcaatcaggtcggcacgaacgtcatcccacaatccgagcgtcttcggggctgcgaatgcctcaatctccacgctggaggaaccgtaggtgatggtggtgccaagaacctgctgggtggcacggttggccttcactcgcaattcaatgcccttcaggaacggcagataatatgatcccatatcgaggtactcgtcgtagtcgggaacgttctcatcttccacatcccacggaccatgctcgtcaccgcggccctcgtattcagcggaagccttcggaagcgccacgacttcctgagcttcgtcaacgttttcagctgcgtcaacagcctcttcgttttcttcggcggccgcttcaagagcttcctcgctctgatgcctcttcttaccgaatccaaacaatcccatgatgttcctcatttcattacggttgcaaccgtgactagcctagcacctatgcttaatatgggctgggaatcggggtgtgccattgcttggatacgcatcccagcccatccctctcacacgtcgtaggtgatgctcaacggcgcgtggtccgaccagcgcaggtcataggcaggagccttgtcgatgacaaatccgcaggccgattcggcaagctcgggcgtggcgaactgatagtcgatcctccagccaacattgttgtcgaatgcgcgaccgcgctggctccaccatgtgtacggcccttggatatctccggcaagatcgcgcatcacatccacaaactccagttcacccaaccatttgtcgacatatgcgcgctcctcggggaggaatccggcatgcgtttcgttggctttggcgtttttgatgtcgagcggcgtgtgcgcgatgttgaaatcaccgcagagcaccgcttgttttccgccgtgtgctgcctcgtcacgcaactgttccatgcgtatcagcatggtgtcgaggaaacggtatttctgcttcattttttccggatcatcggtatttcccgcatgcacatacacgcaaaccacggtaatgacatagccttgtggagtttgcatgtccgcttcgatccaacggccggaatcgacgtcatcctcaagtcccggcaatccatatcgtttgtcgacaaccggcaatgccgacaacagacctacgccggcgcgccccttgatacggcaaatctcgttcatacgatgcagttcgctctgatcggaaatacgtcccgccgttgagtattcgaaaccgaattcgtcgaaaataggatcgatttcgttttgcggggcacgcacctcctgcatacaccacacgtcaggtgtgttgcgtccagcccactcctcgatgcctttgcgttttgccgctcggattccgttcacattggaagtcgtgatagtgatcgtcatagcgttctagcctagcttgcatacaagaaaagccctcggcacatgccgaaggcttatcttgatgatgttatcgcatcaaatcagtcaagaccgagctgcagcttgccgccggggatggcgccaagcagatcacgggtgtactgcttctgcggatggtcgaagacctcgtcggtggtggcgtgttccaccagcttaccgtgctgcatcaccacgacttcgtcggcgatctggcgtaccaccgccagatcatgggtgatgaacaggtagctcagtcccttttccgcctgcaggtcgttgagcaggcgaagcacctggtcctgcaccagcacgtccaatgcggagacggcttcgtcgcagacaatcacatccgggtcgagggccatggcgcgcgcgatggcgatgcgctgcctttggccgcctgaaagctcgttcgggtaacggctcatcaccgattccggcagttccaccatgtcgatgagttcacgcacgcgcttggcacggctcttcttgtctccgatgccgtggatgcgcaacggctcctcgatggaccggtagatggagtacatggggtcgagcgatccgtacgggttctggaataccggctgcacgtgacgtcggaagtcaagcagctctttgcctttgaagccggagatgtccttgtcgtcataggtgacggtcccggcggttggttcgagcagcttcagcaccatgttggccacggtggacttgccggaaccggattcgccgacgatggccagcgtggtgcccttcttgatggagaagctcacatcgtcgaccgccttgaacatctccttcttgcgtggcagcttgaattccttggtcaggtggtccaccgtgatgatggtttcgcccttcttcagggaatcctcgttcaccgcgtgttccatgaccgcggtggcatcgccgccatgctccttgacggagatgatgcgctgagaggccaaggacggcgccgcggcgaccagacgcttggtgtatggatgctgcggatgctgcagcacttccagggaaggaccggattccacgacctggcccttgtacatgaccacgatgtgctgggcgcgctccgcagccagaccgagatcgtgggtgatgaacagcaccgcggttcccagagaatcggtcagcatgtgcagatggtcgaggatcttcttctgcacggtcacgtcgagcgcggaggtcggctcgtcggcgatgagcagttccggacggcaggccagaccgatggcgatcaacgcgcgctggcgcatgccgccggagaattcgtgcgggaactggcgggcacgggtggcggcgtcaggcaggccggcctcggacagcagaccggcgatgcggtcgtccatggtggagccgaccacatacttcttggcgatgtaccatgcgtcatcgtccttcacaccggctttgatcaggccatcagccacacgccagcgggtttcggatcccggaacccattcctcggcgaaccgggccatgatcttgtcaagttcgtcaccgctcttgccgatcttgacaagagcttccttggctgcggcggtcagatcaggcagttccttggagccgaggaaggtctcgtcgtcattgcctttgagctccacttcgtcgccggccaaagccttggcgaatttggaacgctcttcgtggtcgatgtccatgttgttggccaccaacgcttctttgacctgggtgccgatgcgccacaccgggttcaggttgctcatcggatcctgcgggacaagacccatcttgctgccacggagcttgtcgaagtccttctgcttgaagccggaaatctcctgtccatcaagcttgatggagccgccgacaacatggccggttcccggaagcaggccaagcacagccatggcggaggtggacttgccggaaccggattcgccgacgatggccacccactgaccaggatacacgctgaaggacgagttgcgcacggcatgcacggccttgccttcatcggtggtgaagtcgacctgaaggttcttgacctccaacagcggcccgtgggcgcgctgcatggcctcgaggttgttctcggtattcatttcagtcatcgaatatcccttcacttacactcaggccgtacggctcttcggatcgagcgcgtccttgacggcgtcacccatcatgatgaatgccagcacggtgatggccagtgcggcggacgggtagaacagcaccatcgggtcggtacgcagaatggactgcgcgttggagatgtctccgccccagctgaccgtggtggtgggcaggccaacgcccagaaagctcagcgtggcctcgagcacgatgtaggtggccagcgaggtggtgccgaccacgatgatcggggccagcgaattcggcaggatgtgacggaacaggttgcggatcggggtggatcccagtgcggtggatgccgtgttgaattcgaggttcttggcttccatcaccgcgcctcgcgcgattcgtgccacggaggtccagccgaacagcgtcatcaccagaatgatcttccagatggagctgctcgtcttgaacatctggagcaccacgatggcgccaagcagaatcggcagcgcaaggaagatatcagtcagtcggctcagcacggcgtcgacccatcctccgaagaagcccgcgattgcgccaatcagcgttccgagcagcaccaccagcagtgtggcgaacacgccgacgctcaacgaggtgcgggtgccgtagaccacacgggagtaaacatcgcaaccttgcaggtcgaagccgaacggatggccagcggaagccggatcaagggaattgtcgagcgtgcagtagtttgggttctgcttggtcaatacgctcgggaacagcgccacgaacacgatgaagataatcagcagtccggagatgatgaacaacgggttcttacgcagggtgcgccacgcatcggcccacatgcttgaggccggagcggattcatccatcgagtcgacggccttcagaggcgtctcatcgagcggtgccacatagcgttcctgtcccggaagcacggtgaaaggattggtctcattcatttcggtcatttcttgttacctccctcaactcacgcgtaacggattcgcggatcaagcgcggcgtacagcatgtcgaccagcagattgcagaccacgaagatcagcatgagcaacgtcacgatggacaccaccaggttgccttcacccttgaggatgctctgataggtcaggtagccgatgccatgcacgttgaagatggtttcggaaatcatcgcgccgctcatcagtgcgccaagatcctggcccagataggtgacgacggggatcatggagttgcgcagcacgtggcgcagcatgacggatttgttgttcatgcctttggcgcgcgcggtgcgcacatagtcgagggcgatgttggacgaaatctccgtacggctcagacgaatgatgtacgccatcgataccgagccaagcaccatggccggcatcagcaggtcgaggaagcctggattcgctccggcggtaaccggcagcagacgccatttcacaccaaggaagtactggcacaggaagccggtgacgaaggtcggcacggagatgagcagcagggagaagatcaggatgacggtatcgcaccacttgcccttcttcaggccggagatcacaccgaagaccacaccgaaaaccgcctcgaacacgaaggccatcagggcgagcttgatggttacggggaaggcacggccgatcacgtcgatgacaagctgcccagagaaggtcttgccgaagtcgagggtcagcgcgttcttcaggaacagcagatactggacgatgaacggcttgtccagattgtattcggcacggatctgggccgcgaccgcttcgttgaccggcttgtcgccgaacatcgccttgaccgggtcgcccggcaacgcgaacaccagggcgtacaccagaagcgtcgtgccgagaaccacagggatcatctgcagaatgcgtcgcagaagatacttgcccattggtttctccttttgattactcactcgttcgccagccgtttgcggcttctcccctaacgttcgcacgtataggtcaggggcccggggcggccggcgcttgccccgttacgtatcagtgatactgcaccacagtgctctatattgcagtttcatgaaagacagttgaaaatataccccatgcgcggacatcttctgttgatgccgcatgtccagccgtcatcggacctccgatggaagtcctgtttattacgctgaaaggaaggaacggatattcgaatccgtcccttccttcataccgatcctacgaaatcaaatcagagaacggctcacttgccagacttggtcatgttctcgtagaccggcaggttctgccagttcatctcgaagccggaaacaccggtcgaggccacaccataggcattggcgtagtacagcggaacggccggcaggtcgttgagcagcacttcctgcgccttctgatacagcttgttggcgtctgcgacggacttggaggcagcggcctggttgcacagatcgtcgaacttggagttcttgtaatcaccgtcgttggaaccattgccatcggcggccgaggacgcgaagttctgcatcaggtagttttcggcggacgggtaatccggctgccagccgctacggaacgcgccgttcaccttgcggtcggacacggcggtgcggaaatcgttgaaggtcgggtacgggttggtggcggcaacaccgtcgcccaacacgttgttgatggagttcacgacagcggtgtagatgacctcgtgaccgccatcggcgttgtaggcgaaggtgagcttgtcgtcagcggtccacggactgatggcgttggccttcgcccacagttccttggccttcttctcgttgtacttcaggttgtcggaaccggtgagggaatcggagtagcccgggatcagcggggaggtgaagtcggcggccggggtgccggtgccgttgagcaccttcttgcagatgttctggcggttgatggccatggagatggcctgtcgacgcagggtgccttcttcggtaccggcctcgaaatgcttcacattggacggaatagtgaactgctgaatgacggaaccagccttgttataggcctgcacggtggagtccttttcgaaggtcttggtggcagaggcgggaacggattccatcacgtcgagggaaccggactggatgtcggcgtaggcggcctcatccttggtgtagaccttgaaggtcacgccgtcgttcttcggaacgcgattgcctttgtagtcggggttcttcaccagcacgatctggttgtcgtggtcccaggactggaacttgtacgggccgttgccgaccggcttctcgccgaaggccttcggatccttgaagaaggattccggcagcggggcgaatgcggtgtagccgaccttgatggcgaacacggagtcggactggttcaggtcgacggtgaactcgtgatcgttgacgatcttcagaccttcaagctgctcgtcacccttgaggttgtctccgtcctgcagcttgtcatagcccttgatggtggagaagaaggaggagccgagctgggcgttcttggcgttggccgtgtagctccatgccttggtgaaggattcggcggtcaccggggtgccgtcggtaaacttccaaccatccttgagcttgatggtgtactgggtggcgtcatcgttggacttgatggactccgccacttcgttggaggcgttgcccttggcgtcgaaggaaatcagacgtgcgaacagcaagtcgagcggcttgccgccgccggtctcgttgcagtcgcccgggatgagcgggttctgcggttcggaattgtatgcggtgatgacgttggaacccttgtcagcggtggagccaccgttggaagagccgcacccgctgagcagcataccgaatgcgcatgcggccgcagcgaaagccagagctttcttcttcatggaattcatattctccttatccattattttcagagccgtaagacactgttcaaaaagaaggcgggcgtcaataccgtggcatcaacgtccgtcttcgtctgatggtggattcattatcactcgattgagggacaaccactccatatccgagggaggcccatgcaaaatagtcaaatcaaaactcatcatctgataaaacaaaccgtttttcccgcttatcgccggaacaacttatccgcatcgtgtgtatggacggacacagacatatctgttcgctgtcagcgtactttgccgattcgtgtcatgcccgtggaaatgcctgtccgtatcgggctttcaactgttcgatggagacatgcgtgtaccgttgcgtggtcttcagcgaggaatgtcccaggagctcctgcacctcacgcaaatccgctcccccgtcaagcatatgcgtggcggcactgtgccgcaacgcatgaggactaatgtcgggaacgccggcatcacgcgcgcatgcgtgcaccacacgacgtaccatccgctgatcaatgcgtttgccttgtctcccaagaaacaacgcagctgcggactgctcccccaccaacaggggacgcccatcatctaaccaccgaagtatcgctttttgcgccggagcgccaaatggcatgactcgttgtttgttgcctttgccggtcactttgaccgtccgattggaaaagaccacatccggtacatcgagtcccaccagttcagccacacgcatgcccgtcgcatacagcagttccagcattgcggcgtcacgcagctcaatggcctgctgcttcatagtccgttccttcggctgagacgtttcactgtcctcgtccacgcggtccatcagctgttcggcctgtgattcgctgagcacatccggcaacgtatcaggtattttcggggtcatgagcgcacaagccggatccgtcgtcgtcacgccatgctcatgcgtccacgcgaaaaaaccacgtaccgccacggtttttcgggccatgctgcttttcgcatggtttttcgatgattccgccatccacatgcgaagatcttcgatggtcacctcgttaagatccctgcatccaagccgctccaaggcaagcagacattcttcgacatcgcctcggtatgccttccgtgtgttttcactcaatccacggttggctttcagatatgtatcgaatgcctctacgctctcatcgaacagcatgccgatcagcctttcccgagctcaacagcaagcccaaatccatgaatttctttccattatgtgtccattctccgatagaaaccgaaataccggcacaacttgaaaggagaccaactatgctgtccagtagcgttcgctcagcgaatccgtcgatgatcgtctattcgaaggggagattatgccgattccaaacgaaattccagcaggtgcacgcattgtggtgcgcacctgcgaaggtgtcgatccaaaggaccagcgcatgaaattccgcgattatgtcggtcacgtacgttcttgggacgggcagacattggaaatgacgcgcgatgcggcagccaacggttcacgcccggagcaacgtgtcagcattcccgccgacaccatcatcactgtcaaaccggttccggaacgttccatgacacggccgcgcccatagcgcgtcacactgcggaacgcacctgtgccatagcttgacggtaaccgtcgaatcgcacgatatgctctcccctacgcgccgactccagaagcatctgctgccatccggtttcgggaattgccagttcgaccgttttgcaacgttcttcgaagtcaggttctttggcgagagccttgtattcacggaatggctgcccttgtatgaagaaacgcgccatctccttgtcgtcaccggcagtgggcgagccctgttgcgtggtcatgccgtgcagcacgttggccataagcgtcaaccgattggccatattacgcagcaacgcttcgacattggcggcgtcctcttccaccattgcacgggtacggtttggatcggttagcgcaacacgagtcatgtcccgccatgaaccagcggcgagcgcggctgcaatgttccggttgggattggccaccagctcgttgatcatagctgtggaaatgacgtgtggcatgtgggaaatcagtgccgcgcaacgatcgtgggtcgcatcgtcaagaacgatgagtcggttggaacaatgatccacaatcattgtcgcaacggcgcggaaccgctgatactcggtgttttcatctacggtgatggcccagagcgcgccatcgtaaagcgtcggatccgacgattcccatccggacagctcattgcctgccatgggatgcgcgcccacatagcaatgttccaatccaacggctttaacctgttcccgaaccattgctttgacactgccgacatcggtgagcgtggtaatgtccgtatcgatcagtggcttcaacgcacccaggatttgcggcatggccttgagcggattgcataacacaagcacgtcaggttttgtgtcggcaagcgcggccagtgtggacacacatcgtatgccgtccgctttcgcagtttcatatggacgatcgttatggttccatgcgatgacttcacagccagcattaacgagtctgcgagccagtgaccctccgataagaccaaggcctacgattgcgatacgctgcttcaccacatcagctcctttccgaccgtttcgctgttctgccaatcgtctggcagatgctgttcgtcaagccgtacgcctccctgcggcagcatccatgaggtgactggaggattggggcgttcccttcgtgggtatacggccagagttttggcccagtcaccgtgttcggcgatttcgaccagcgctccatggaagcgttgctcccatggcgccgcatcaagcgtcgcgataaaactgtatgtgcctgtgcgtcctttgattggccgcgagatgaaacttgtcatattgaggcctgcatcgcggaatacgtccagcaggttcgcgagtacgccaggacctgtgacaagcggaataagcgtcagcacggattcgtattccatatcagcttgcgaacgaggctgttccaacagttttccggcttccttgcgtggtgcgagcacaagaaaatcagtctgtgcgccttgataatcctgcacggcggtaccgatgcgcgtcacattgtagagttcaccgcaaatacttggcccgaaagctatttcgtttgctttgatatcgcgacatgcggcagcattggatggcgctggagtcggttccaaatggtgttccgcgatgaaacgtttgcattgcgcgagaccatgcgcgtgtgcggtagccacggtggcgtcttccggattggatcccgcacgcacatatgcgtcgaaagttacgtcgacgcccactcgcgcaaatccgactagatctttggcgtcgatgagcgcgtccagattcggcaccacgtaaccttcgacgttgttttcccatgccacgacgccccatccttcgccccgctgcgcggcatcaaggatttgcggtacgtcatccgcagccaccaattcgaatccttccggctcaagatgggccagtgcctgtgatgcattgactgcggcctgatgggtgaaggtgccttgcggacctagatagaacagctttcgtgcgctcattcaaccccattccttattcttggtgttcccctgaaccttacctcattgccgtggaatcgactgccgattattccaccggttgggcgttatcagatgttttaccctcgttcgtctgcgtatcagcagcaaacgcaccatcacgcgtctccttacgcggaggtgtgacgaaccaacgtttcggcagcaccagcatcacaaccggaataagcacgacaccgtacagccacatgtatcctgcctgttcactgaagaacggcatgggatcatctccaccgaatcccacaggaatcatggcgtctcctcccggaccataccccgacatcaccgtccagaccaccagagaggaaccgatcaggtgcaatgcgaggcctgagacaccgtcgcgtgatcgagctgaccatgtcgaaatgatcaccatgagataggcgatcgccaatccgtagggaatattcatggatgcgcccatgcgatgggccatggttcccactactccgactatgattccggaaaccagatcgacgaggaaccgtccccaaatcggcagacggtatgaccatggcatcagttgcgcatcgggcgccgcgtcttgattcgacccatacgtatcatgcgattgcttcatctgttgcatcatatcccctactatcgctcaccaacctgaaaagaaaaagagatacgcgaggacacgtatctcttttcatggaagcaataacagaatcacttgttcttctgagcgttattctgctgagccgtcaaacggagagcccagcgggctcaccgtaggcgaagtgagcaagccactaccgtgcttgcgaagccgacagaacaacgtgaagaatcacttgttattctgagcgttgttctgtcgacgctgcttggcgcgccacttgtaccaatcctcacggctgagaataatcttgcgcacacggatggattccggagtgacttccacgcactcgtcctcgttggcgaagtccaaggactcttcgaggctcatcttgatcggcggagtcagggtttcgagcacatctgcggtggaggaacgcatgttggtcatatgcttggccagcgtgatgttcacatccagctcgtcaggcttgttgttcacgccgacgacctggccttcgtacaccggagactgcggttcgacgaagaagttgccacgtgcctgcagacgctgcatggcgtacggagtggcgatacccttgcgatcgcagaccatggaaccgttctggcgggtcacgatctggccagcccacggagcgtagccggcggagatggaggatgcgataccggtgccacgggtggcggaaagcagtgcggtgcggaagccgatcagaccacgggacggcacggtgaactgcagacgaacccagccagtgccatggttggtcatgttctccatacggcccttacggtcggcgagcaactgggtgacagtgcccatgtactcttccggaacgtcgatggtggtgttttccatcggttcgttgatcacgccgtcgatggtcttggtgaccacctgcgggcggccgacggtcagctcatagccttcacgacgcatctgttcggcaagcacggccaaggcgagctcgccacgaccctggacttcccatgcatccgggcgttcggtcggcagcaccttgatggacacgttgccgatgagttcgcggtcaaggcgatccttgatcatgcgggcggtaagcttgtggtccttgccttcggttccggcaagcggggaatcgttgatgccgaaagtcatggagatggccggatcatcaacgtggatcagcggcagcggacgcggatcggacggatcaacgatggtttcgccgatcatgatgtcattcacgccggcgactgcgacgatgtcgccagggcccgcggaatcgaccggggtgcgctcaagaccctgcgtacgcagcagttcggagacgcggaagttttcgacggagccgtccacacgggacagaccgtaggtcttgcccttttcgagagtgccgttgtagatacgcaccaagccgagtcgacccaggaaatcagaggaatcgatgttggcgacgtgtgcctgcaaaggcgcgccttcctcgtattccggagccggaatgttcttgatgatggcttcgaacagcggttcgagatcttcgttatccggcagaccgccattctccggctggttttcggaagcgtagccggccttggccgcgcagtagatgaccggcaggtcgaacagcgcatcctcatcgagatcgacaccctcttcgataacgtcctgagccaggccgagcagcagatcggaggattctccaacgacctcttcgatacgtgcgtccggacgatcggtcttgttcacgcacaggataaccggcagcttggcttccaaagccttgcgcagcacgaagcgggtctgcggcagcgggccttcggatgcgtcgacgagcagcacgacgccatcaaccatggagatgccacgctcgacctcgccgccgaaatcggcgtgaccaggagtatcgatgatgttgagggtgatgccttccggatggccgtacttggcggccagcggaccggtgtactgcacagcggtgttcttggcgaggatggtgatgcccttctcacgttccagatcattggaatccatcacacgatccggaacttcctcacgttcgttgaacacgtgggactgtgccagcatggcattgaccaacgtggtcttgccgtgatcgacgtgtgccacaatcgctacatttcgaatatcgccgcgaaccgccatcgaaacctctcttagtattgctgttctcttgcgttaccgttcggtacatactggttatcggtacttacaaatccgtactccacacaaaccgagccaatcctagcgaaccattacgacagttccggtcccagcgctttcgcccacatacaaagtttgcggttgtcgaatctcaacaaccgcaaacgtatgatctcttgggaccactcaaaataattcgttaatcctcaagttccttaccagtgcgttccggcaagcacaacgccgcaacgcaggccagaatgaaggcgaccgcgaaaacgatgaatgccaccgccttgttgccaccggacagcgtcaggaaccacggcatgagcagcggagctatgatggcagccactcggccacatgccgcagcagcaccggacgcagcagcgcgcaggcgggtcggatagatttccggagtcaccgcatacagtacgccccacgcgccaagattggatgcggacaacaacatgccaaagcccaacaccgcagctacggaacccgcttgcgagaaagcaaacgcggccacggccgacacggcaaggaacacgctcagcgtcttcctgcggccccagatctccaccagccatgcggccaggaagtatcccggcaactgcgccacggcgatggccagcgtatagccgaacgacttggtcagcgagccaaactggtcggccagcagcgacggcatccatgtaaacgctccatagtaggagaagttcacgaagaaccacgtggcccaaatggctgcggtgcgcgcgatgcactttttgccgaacagttcgcgggtgttgatcttcggcagtggtttgcccttcggggaagccactggctcgatgccacctgcctgttcgaaatagcgtacggcctgttcggcttcgtcctcacgccccttggattccaggaatcgcacggattccggaatatgaacacgcgtcacaatggcatacagcagcggcaacgcgccaatgagcaaagcccagcgccaaccccaatcgccggtattcggaatcacaaagtagccaatgcaggcggcgacaatccagccgacagcccagaaggattccaacagcaccgtcatacgaccgcgttgtttggtcggagagaattcagaaaccagagtggaagccactggcagttcggcgcccaaaccaagaccgatgatcagacgagcgatcaaaagcgcggtcaacgaccatgacagtgccatgccgccattcgccaaaccgaaaatcaccagcgtcgcggaaaagaccgttttgcggccaacacgatcggctacaaaaccacccagcgcagcaccgatcgccatgccgacgaagccgatggacagcacccagcttttctcggttggtgtcagattgaaatgcgggtcagccgcaatggccgccacaacgaaggacaccaagccgacgtccatggcgtcgaaagcccagccgataccggacgccaccagaagtttcctatgcgctttgttaaacggcaggcgatcaagacgctcattgcgtgtcaacgaacccgacgaagcaaccgatgcggattgcacggatgtcatacttcttcctctcatacgaaacgaccatgtctacaaggcatgccgaaaaccagacagaatcgtctgaaaaggaaacaatccgaaaagacgtcagatcgtcgtcaacgcggaaagcacatcatcctgcgtttcccgcacatcgaaatcatggcgatcccgagcatcgctccatgtcgactgtcggagcacatccatggtgtagcgatacaccgttgccggacgattgcgtccgacacgcaatttgtcaccggtgtcctccagctgcccggatgcgagcatcttacggcggaaattcgccagatcgatgctctgaccggcaacggcctcgtacacgtcatgcagctggctcagcgtaaacctctcgcctaccaatctggtgacgatctgcggatattcgattttgccacgaagtctgctgagggcgtagtccacgatgtcgccatggtcaaatgccaactcaggcagatcatccacaggaaaccatttgacattgtcgtcgatactctgcccgagttgcccgttaagatcgtcgaccaacgcccaatagacgatggataccatcggcagcccgccgtgtgagcgcgctggatcgccgaatgtatacagctgttcaagataccgtggatgcaacgatgtcgtggattccagcgcaacgtaggcagattgctccagcgagtggtcagccctcaaaccaccaccaggcaacgcccactggccaagaaaaggctggcgcacgcgccggaccagcggtatccacaaggtggatcccgcactggttcgagcatgttcctgcgttccgtgggaagctggccccaaagcgagaatgaccacggaaacgcccacctgcggcggctgtttgcgccgttctgagacattgcccatgatcatcgcgacctcacctctccgatcttttgtcgatttgaattgttccggaatcacagtgtagcacttatagtcaacatgactataagtgcagtgtttcaccacaccgcttgaatttcaacccacgtatgcccttcaacgaaaaaggccccacgaaggagccctatgcgtcttatgcgacgatgccctgagcaatcagctctcgggcaacctcacgatattccttcgcggtcttatggttcggcgcataaatggtgataggcgcggccgcaaccgtggaatccggaagtttgatggaacgtgagatgactgaatggaagaccttgccttggaatgcctcataaatacgctgcaacacttcatcacaatgcaaggtatgcgtgaacatggtgacgagcactccgtacacttccagactcggattgatgcgggattgtactttttcgatggactgcatcaacaaggccacgcctcgcagtgcgaagaactcagcagccacgggaatgatcacgccatcggcagcggtcagcgcattcaccgtaagcaaacccagagaaggctggcaatcgacgatgatcacatcgtattcatccttgacctgacgcaacacgccagccagcacctgctcgcgcccaacttcggtgaccaactgcacttcagcggcggacagatcaatgttggccggcatgatatcgagattctcgaaatcggtatgtcgaatcacatcatgcacatccatgcgaggattgaacagtgcggtgtacaccgtatcttccacggtattggcgttgatacccaaccccaccgtggccgcaccctgcgggtcgaaatcgacgataagcacgcgacgcccatactggctcaatgcaccagcgatattgatggaactggtggtcttgccgacgccacctttctggttgcacatggcgatgatcctcgccggaccgtgcgtctgcagcggctccggagcgggaaacgtctcataatcacgtccaagcaaatccgtaggcataccgtttaccttaccaacatccttgtgtcaattttcactgtaatccatgctagtccattgtcaccgttcaaaacggcagcaacaccatcatctggcgcgcggatgagacatcagatatgtctcaatcaggttttcaggactgatatgcgtgtaaatctgtgtggtggtaacgcttgcatgaccaagcagctcctgcacggtacgcacatcggcaccgccctgaataaggtgcgtggcgaaagagtgccgcaaggtgtgaggatgcagcggcttatcgatgtgcgcacgctcccccgctcccctgatgatttcccaaaccgactgtcgcgacaatctttttcctcgtttattcagaaatagggcacgccgttccacgggacctttcgatttggattccagcttaggacgccccgcacgcaaataccggatgatcgcttcgcacgcatagctgccgacgggaaccagccgctgcttagagcctttgcccataagtcttgcgattctgccgtccacatcgacatcatcgagattcgcaccgcacgcctccgacacgcgggcaccggtcgcatacatgaattcaagcaatgccttgtcacgcaacatcaccggatcatcgggaaactccgacacgacaccatcatgctctctgttttgagaaacggggatagagtccagcagtctagccacctcatcaacggtcagcacatcgggaagcgtgctcacgcccttaggggcctttacctgcgcggacacatcatcgacaacaatatgttcgttcactgcgaaacgatgaagcgcatgaatgctggccaaccggcgtgccttgcttcgagatgactctcccgactcgtcaaggaagacgatataacgttccacatcctgtgtcgtcacggccgcgataccgccaacgccttggtcggcaagccactgacgatacttcttcaaatcggcgccatacgccgacaccgtcgccttcgacagtcctcgttcaacgtcgatatgagcgaggaattgccgaattgtccgttcgaaatcgtccatcaccctccttccagcagatcccatccggctcatcgtataccactgagcggtcccttaccataggtcaaacgagccctgccatgcaacgcaggaacccccgcccattgctggagcgagggttcctgtcaatcacgctgaatcagcgaagaagctcaggcttccttcggagcattcacatcagccggaagagcggccttggcctgctcgacgatggccttgaaggtctccggatcagagatggccagctcggcgagagcgcgacgatccagttcgatgccagcgaggtgcaggccctggatgaagcggttgtaggtgatgccctcagctcggacagcagcattgatgcgctggatccacagcttgcggaagtcgcccttgcgagccttacgatcgcggaagttgtaagtaaaggagtgaagcagctgctccttggccttacggtacagacgggagcgctggccgcggtagccggaagccctctcgagaacgacgcgacgcttcttgtgggcgtttactgcgcgcttgacacgtgccatatttgattcctcagctttctattaagtcttcttattcgctctcgctatactcagcgaccgagcagcttcttcatgttcttgctctgggaagtagccagaacgccgtcggccttcagtgcgcgacgcttacgagcggacttgtgctcgaggttgtggcgcatcgcggagccagcgtgcatcagcttgccggaaccggtcacgcggacgcgcttggaagcggcggaattagttttcatcttcggcattgctgccctccttgtttattacttcgtttcggaagtcttcggtttgtcggatgccactgcagccttggcttcggccgccgcctgagcttgggcttcctgcttggccgccagacgtgcagcctgacgggcctgacgctcggcacgggactgatcaccacgacgacgctgctcggactgggtgtgaaccttcttgcccttcggtgcgagcgtcatgatgatattgcggccttcctgcttcggagcgaattcgacggtgccgtattcctccacttcgctggcgagacgctgcaagagctcgacgccaccgatcggacgggactgctcgcgaccgcgcagcatgatggtgaccttgaccttgtctccaccgttcaggaagcgcacaacatggcccttcttgacttcgaagtcatggtcatcgatctttagacggaagcgaatttccttgatttccgcagtgctctggttacgacgagcctcacgagccttgatcttctcgttgtacttgtacttgccgtaatcgatgagcttggcaaccggaggcttcgcgttgggcgccacctcgacgagatcgaggttcgcttcctttgccaggttcagtgcgacggaagtcgcgatgactcccacctgttcgccgttcgggccgatcagacgcacctgggagacgcgaatctcgtcgttaatgcgtggttcgtcgctgatgatgactccaatcctcatgttccattcgacggaatgctcccagatcggcagtttttcaaagtctcgcatgttcacggcaagccaaaacacccaattcgagggcgcaacaaagagccataccacagctcttccactgccgtttcatacggcaccagaggcttatgcctgaacccgaggccctgaaaggcttccaggtggagatatcccgctttcttgatttctcaagccttgtagataataccacacaccgcgaccacagcgtgtcgcataatgaaaccttctgaaacatcttctttaatcattccaacgccatattacactgaccccatatgacagataattccaacacatgcgtgattttcgcggctggcgaatactacagcgatacccccatcgttccgtctggagcattcattatcgcggcggacggagggcttgaccatgcacgcgcacttgatatgtcgcctgacgtggtggtgggcgatttcgattcgcttactggagaacgtccgacacagggtgaacacaccattgccctacctccagaaaaagacgatccagaccttctgtcggcactaaaaatcggctggtcacaccatgcgcggcttttccatatatatggcgcgctcggcggacgaatcgatcacaccatatccaatatccaactgatggcattgctggctcagcatggtgcagtaggttttctgcacgggaacggctccattgtgaccgcgatttgcgatggagcactcgatttcggcgagaacaacgtcgaaccaggacgtatggtttccgtattctctcattccgacacctctcttggcgtgagcgaacgtggactgaaatacgagatagatgacatgacgatgaccagcacacgtgtcaacggcgtcagtaacgaattcctcaacggagccgccgcccatatcggcgtcgaacatggcaccttggtggtgactttcccttcggaagccccactaccagcagtctcttggcaccacacatttgagggtgacctcggatcgttggacaccaaagtatcttcagcgcttgccaagcacgaactccaatcccgctaatcgcaaagcgaagaaaatcacctttcgtctatcacgttcatctcgaaaagatgatgtgagcgttcacggaaaaacacgacgttttctgaaacacacgcgcgagtgcgttgccttaagtacaggtgacgcactaaagtgggtgacgttggtaaacaatggcttctgtgtgcccagcacacgcgtggcctaccctaaagggagaattacatgacagttaagattggtattaacggctttggtcgtatcggtcgtctggctttccgccgcatcttcgagctgcaggctcgtggcggccaggccggtgacattgaggtcgctgcaatcaacgatctgaccaccccgtccatgctggcctacctgctgaagtacgacagcacccacggcaccttccgtcatgacgatggcaccccggttgaggtcacctccaccgaagactccatcgtggtcgatggcaaggaatacaaggtttacgccgagaaggatgccaacaacatcccgtgggtcaagaacgatggcgttgagttcgtgctcgagtgcaccggcttctacacctccgctgagaagtcccaggctcacatcaacgctggcgccaagaaggtcctgatctccgctccggccaaggacgagaccaccccgaccgtcgtcttcggcgtgaaccacgagatcctgaaggcttccgacgtgatcgtgtccgccggctcctgcaccaccaactccatggccgccatggtcaagctgctggacgagaactggggcatcaaggctggcttcatgaccaccatccacgcctataccggcacccagatgatcctcgacggcccgcgcttcccgaaggctcgcaacaaccgtgccgccgcaatcaacaccattcctcactccaccggcgctgccaaggctatcggcaaggtcgttccgtccgtgaacggcaagctgcagggccacgcccagcgtatccaggttccggatggctccgtcaccgagctgaccaccgtcctgaacaaggaagtcaccgctgacgagatcaacgccgcattcaaggctgccttctcctccaccgacttctacggctacaacgaggatggcatcgtgtcttccgacatcatcggagacacccacggtggcgtgttcgatccgacccagaccgacgtcaacaccgttgacggcgtgaccatggctcgtaccgtttcttggtacgacaacgagtacggcttcacctgcaacatggtgcgcaccctgctgtacttcgctgagatctccgagtgaaccatggcggagcaatccgcacagttcactaagtagaacttggtacaagggctttcgtctcacggcgaaagcccttttgctaaccgacacaaatacgttttagagtgaatcgatatgggcaagaaaaagcatgagaagggcgccggctccacgccggcaacagtgcaactcgaacaagcgggaatcccattcaaaacatacgaatacgcacattcgaacgaccatatggatgacggttatggggttgaggccgccaccaaactgggcttcgatgaacatcaggtattcaaaacgcttatggccgacaccggctccgaacgtgtggtgggcgtggttccagtaagcgggcacatggatctgaaagcgctggccgcagcagtcggagccaagaaagccgctatggccgatccaaaagtcgccatgcgcgaatccgggtatgtggtgggaggcatctcaccactcggtcaacgtacgcatcacaaaaccgtgctcgacgaaagcgcgctgcaatatggcgaaatactactgtcgggaggcaaacgcggcttttcgatcggcatcaatcccaatgatctgctcaaggtgcttgacggcatagccgcacctatcggcacctggtaatcaccggtaatagaagccggtcagcaggctggtttcttacgaagctcactggggagcacgaaatgcatgttctccttaatggtttcgatggtggtcacatcatcgaaaccacgctgttccagcgcttcgataacgcctgacaccaattcgtcaggcacggatgctcccgacgaaatccccacggattcaacgccttcaaaccacgcaggatcaagctcggacgcatcatccacgcggtaggcctttccgtgaggaccattcggcacgccatcgaagcgcgtgttcagcccctcctgcgcaacctccatcagacgaacggaattcgacgaattcgccgaaccaacgatcaccacgcaatcagactgctcggcaaccaacttgaccgcggcctgccgattcgatgtggcatagcagatatcggaattcggaggcatctcaagccaggggaaacgctctttcaacgcagcgatcgtgcccgccgtctcatccacgctcaatgtggtctgcgaaagcagcaccaatttcgcatccgaagaaaactcgagcgaatcgacatccgattcatgttcgatgaggtgcacatgttccggggattcaccgaccacgccaacggcttcatcatggccgttgtgtccgatgtagatgatctcgtacccttctttgacgaaacgcaacacttcacggtgcactttgctcaccaaagggcatgtagcatcaacgatatgcatgccccgagctgaagcttcagccttcacctcaggagacacgccgtgcgcagaaaagacaatcggaattcccgcggaagccgcggcatcgggaacctcatccaattcctgtacgaacaccgcaccctgagccgacaattcctcaacgacatgcttgttgtgcacaatctgacggcgtacatacaccggcggcagaccatcattgcgagacgtattggcagctttgagaatcgtctgcacagtcagaatcgccctgtcaacgcccgcgcaaaagccacgtggatccgccagtacgatacgcttggtcatgatggccgcctttcgtcacttcgtgaaaacctcatcaatactaaagcatgggcggcacgccggagaaacggcatcgccatacggcataaaacaggtagactgtggtgttagcggtaacgctaccgttaccggaacatatccaacggcactatggagtgactatgacctgcatcaatctgcctgcccgcaccggacagcaattctccatctcccatggcgactatgaagccgtcatcaccgaactcggcgcaacaatgcgcaagctgacctataagggcgaagatctgacggtcgcccttggtccggacgatctggtgacctgctgccacggccagatcctcattccgttcccgaatcgcatcgagggtggcgagtacacgttcgaaggcaagacctattcgctgccgatcgatgagcatgaccgcaacacctccatccacggctacggataccgctcgttctggaagctgatttcgcttgccgaagacgcagtgaccctcgcctggcgttcccccaacatggtcggctacccgtttgatctatatgtcaccgccacgtacagcctcgccgacgacggcatgcatctgaccgtcagcgcctacaataacggcgacacgaacgcgccgtgggctttggccattcacccgtggcttgccaacagcctcaacggctatggcgacgaaatcgacgagcacaacgccaagtgcagccttacgctaccggctcgcacgcatgtcaccgtagatgaaaacctcattccgaccggcaccgagccggttgacggcaccaaatacgacctgcgcgaagacaccctacttaccgagcagccgttcgacgatgcatggaccgatctggagcatgccgaagacggttccgtcacggcagtgttcacccgcgccgatggcaagaaggtccgtgttggcggcgatgaaaccatcacttcgttccaggtgtgcaccggtaccaagttccccgcattccagcatcctgccggcgttgccgtggagccacagaccgcctacgccaacgcgttcaacacaggcaacgagctgatcgtgatcaagccgggcgaaaccaccagcacctcgctgttcctcggtatggccgagtaaacatgcgagtgaacgtgatcgagtgatccagtcggttaaaccggctgattccggtcatataaaaacccgacggataagtctaagtggccacctatcgaacaccggatttggcaaacgtctcgctcgtgtgcgataatcccgaaggcttattaatcgtaagtaaaggagtccaatcatgggcatgcgcggacgtaagcgcaaggatcgtcgtaagaaggccgccaatcacggcaagcgtccaaacgcctgatccctgccagcgtgaataacgctatagagcatcgaaaaccccgctgaatcgttatgatcggcggggttttctcatactctcatcggcttgctcaccgctctccacaacaatggtcgagcgttgcctcaaggcggtcgataagactctgcggggcatgctgcggacgcaaatacgcacgcatggccgcgatcaatgcccgttcacgctcgtcgcagcaacgttcggggtcgaaacaatcactggaggtgctaacgcgcacgctggtatgcgtcacctgtgtcacagtgccgtcctcgctggcggcgacagtggtgatatgccgttcgatcgattcactcatgctctgcccttccccgccgtggcatagccacgttccttcgcatagttggcaagttctcgtttcaactgcgtacgcgcgcgattgagacggctcatcaccgtaccgattttcacaccctgttcgtcagctacctgctggtatgatttgccgtcgatagcagcatcgatgaacacctgacggcgttccggcgaaagcttggcgagcgccgccatgatttcttcaggcgcgtaagcgtccaaatattcctgttccgccgatttaagctcttccggtgaatgctcggaagccgaatagatgtcccaatcgtcgtattcgccggtggaatcgttggctcgctgcggtctgcgcttggctttggcgtattggttgaagtaggcgttgcgctcgatggtcgtcatccatgcggcgaaattcgttccctcctgaaaggagtcgaacgccttgaacccccgttcgaaagtatcctgcaccaaatcttgggcgtcgtcgggatcgttggtcagcttcatcgcctgccggtacagcgcatcaaccacaggcatggcaagtttttcaaaacgcgcccttctgcttgccatggtttccgttcgtacttcagtcacagcttcattgtaatcacatcgacttccacatgccatgcacatagctgaaggtagaatggctgttcggtatccgaagaacagggagaacacgaaatatggctttgactctggcatcagcagcacgtctgctcagtgagtatggattgctgcgcgaaatcatccaaggagacgactggacgcttgacgcgcaggccgtcaacggattcgacaagccattcggttcaatcacctacgacaccaggcaggtcgtatctaacacgctcctatgctgcaaaggccgtttcaaagcggaatatctcgatggcatcgatgatcgcggtcttgccgcatacgttgcggaaaacgatttctccgcggcgacgaaagctccgggactcatcgtgaatgacgcgcgcaaagctatgagtctgctgtccgcggcattctatgggtacccgcaggaccaactgaaagtcgtcggcattaccggaaccaagggaaaaaccactaccgcctacctcacgcaagccatgctcaacggctgctccggcggcaaatgcgcattgttctcctccgtcgacaattgccttgacggacatacctatgccgagtccgatttgaccaccccggagtccatggatgcgttccgtatgatgcgcgaagccgctgataacggcatggaatacctagttatggaggtttcgtcgcaggcgtacaaagtcgatcgtgttttcggacttactttcgacgtcgccgcattcctcaatatcagcccggaccatatcagccccatcgagcatccgacattcgaggattacttccactgcaaacgtcagatcgtaaagaattgtcgttccttggtcctcggcacggcatgcgcacacgccgatcttattcgtcaggatgctgcaatcgccgatattcccatcaccgcgttcgctcttggcgaagcatcggccgcggatgtgaccgcatggccggaatccgccgaccatagccgattcgccattgcggtggaaggcgaacagattggatcgctcagcttgcaattggatggcgatttcaattatgcgaatgccgccgcagccattgccattgcgcatgccgttggattcgatttccatgaaaccaccgcgaaggaaacgctgcacaatatggaaccggtacgtatcgccggtcgtatggagcatttccacgatacgaagtcgaataccatcgccatcgtcgattatgcgcacaattacgcttccgtaacggcgttgctcgactatgtcgaccaacgctacggcaaggacgatcctgaagtcacgctggtcactggatccgcgggcaataaagcgtacgatcgcagatcggaaatcgtcagggccgcgcagaatcgcatcaaccatctgattctcaccttcgaagacacggatgacgagcctgtggaacacatctgccaagacatgctcggcagtgtcaccaatcccgatctggatgcgaggatcattctcgaccgtacggaagcagtggaatcgaccgtagtaatcgatcgcaaggatcccgaccgcctccatatcatccttatcatcggcaaaggcaacgagcgctggttcaaagaccacggcaagcatattcccttcgaaggcgacgaccatattgtgaaacgtatttttggacttgcctgacctgcagcaacagccaaccatcatcgagtaatcaccaaccataaggaacaatccaacaatcatgatcactcttgaattcaccgacgcagccaccatggaacagcaggctgtgcaggcgggtcttaccctgcccatcgaacagaccgcggtatgggccaaataccagaacaccattgacggacgtacgccgtggggtgcgtatgtggtgaagcaggacggcgctccaatcgcattcatcgcacttatcgattacgaaacccatggctaccactatttgaggtccgttcatggtccggcttggcttgacaagccttccacgcagctggaagcacaggttcgtgacctgcttgttgaggacgtacgcaaacgcgataaaaacgttgtgttcctgcgtatcgacttgtggaatttcgagggctcgttcccggtgctttccaccgttccttacaacgagaccgtgtatgtggacatcaccggtggcgatgaggcgattcttacacgcatgaagaagcgtggccgccgcgacgtgcgtaaggcgttgagggagagccccgccgtttgcgccgatgagaccgcgcaggcgatggctgatttttccgaatactacgaggtcatggttgataccgccaaccgtgacggattctcccccgctccgatgagcgactatgtcgatatgatcagcaatcttggtcctgatcatgcgcgcgtattcgcggcacgtatcgacggcaaggttgtggcatggtccatcgttaccatcaacggcgatcacgcggtctattactatgcgtgcatgcgtacggaaatcatgcgccagcatgttcccgacaagctgatttacgttatatgctgcacgcttggcgagcaaggttgcacagtgctcgatttgatgggtatcggcaacgatttcgcgccttcattgaagagtctgaacggattcaagacgaaattctccgaaagcatcgcacagatttccgcaggtcgtgacattccggtcaagaaggcattctaccgttcgctcacgctgctgcagtcgctgcgtcgcaaactgcgcaagtaataatcgcgcctcacgacggatagcgcgaaatatcgtacgaaggaggatgcagcgaatcgatatcgccgcatcctcctttgtattgcatcacagatcgttggatcgatggaccgtcgacaacaaccgacaatccatcatcgccatgcatatatgcgattaccgcacatcttcagaagatgcagcatccgcatgctcaacttcggaagcatcagcatcttcatcttcagcaagatccggaccgacactgccgaaatcgttgatatcgaaatcaggattggcatcggattcgaaatcgagatccgcctcgtcctgatccttacgcggttccggctcaacagcctcctggaagacacgttccgacttcggcttcttcaaatcgggattgaccttctcttccagcatgagacgcgcatcgccagccgtagtgaagctaccgcaaatcagcacaccgtgaccatagccaacaccaagctcatcatcggcgtcaaccatattaacagcctcctgaatggcatccggcagttcaggaacacacgtaaccctttccgcaccaaacacgcgttcagcaaccgttttcaggtcttccgcgggcatcacacgatcacgccacgagttttcagtgacaaccacatggctcagcaatggttcgagcacgcccaaatactcttcgacctgcttgtctcccatcatggcgatcacgccgacgagttgctggaaatcgtaattttcctcaatcgcggcacgcaacgattctgccgcattcacattatgcccgccatccagaatgatcgttggcgatgtgcgaatctgctcgatgcggcctggaatcctcaccgtgctcaacgcctcagccacaagatcaccgtcaagcgcaccgttgacgggaatcaccacttccgccgcgcacagggccgcgagcgcattatgggcctgatgttcgccgaatttggcgatcggcacttccgcgtacgtgccattcggcgtacgcagggtcgcaacctgaccgccgactgccggaatgcgggtcacaacttccgcttcgatgccatccctcaccagattggcatggttctgcctcgccgcttcctcgataatcggcatgacggcctcttcatgcggttgacgcccgatgaccgcggtgcagcccggcttgataatgccgactttttcggatgcgatctgttccacggtattgccaagccatgccatatgatccatgtcgatcggtccgataatggccgcatcggcatcgagcacgttggtggcatcccagcggccgcccataccgacctccacgatggccacatcgaccggagcgtcggcgaacttccagatggccatggcggtgagcacttcgaagaagctcatttttggcttgtcgagttcttccatcttcatgtcgaccatggctacaaggtctttgatttgatcccaggtatcaacgaaatcgtcgtcggaaagctgctggccgtcgatggcgatgcgctcgttgacatgttcaagatgcggtgacgtgtataaaccggttcgcatgccgtaggcacggcagatcgcctcggccatgcgcgcggtagatcctttgccgttggttccggtgatgtgaatcacacggaacgactgctcgggatgtcccatgatgtcgaggatcatcttcatgcgttgcaggtcaagattggtggtattgcgctctgatgggcggctcatgatgtcgcgttcgacgtcgatcatgctttcattgttgcgattcggatgttcgaatgacatattctttcggattcctcccctaccttgggattgctcactcaatctcccttattctatgtgcttgcatgaacgttgcgcggcgcaaaaagttataggatggtttgcggtaattgcgtaagcatggacaaccatattcaggagatgtgatgaacgaagtcattaccgataaagacaaggagtatgaagccatggagcagtccagcgctcccggccctgatcaggcaatgagcgaccgtgtgaacaatcgttcgctgcgcccgcgttccgaggcgttcaaggagttcatgaccaccggttgggatgataatgagccggttattgaaccgttggagtcttcccattacattcaggctcgtcttgacacgctgggtaaggcttttcccggagagcgtattgtgatcccggccggtcagccgaaggcgcgcaacaacgactgcgattatgcgttccgtccggatacgacgttttcgtattacaccggtttgggtgaagactacgaagccggtgccgtgctggtgttgaatccggttgatcccgattctccggaggctgcggccggcaagacgcatgtgccggaattgtttgtggctccgcgtgcgaaccattacacgcaggactttttcatgaatgcccattatggcgaatattgggttggacctcgtgccggcttgcaggagatgactgcaatgaccggtattgagaccaatgacattgcgcagttggctgacgcactgagcaaggatgtcggttctgaagctggtgccgtgcgtgtgcgtgtgattcgcgaggctgatccgcagatcaccgaaatggtggaggatattcgcgaggcgaacggtttcgccgatccggatggcaatacgcatgccgatgacaagcttcatgagtttgccgccgaggctcgcatgtgcaaggacgaatatgagattcgtgaaatgcgcaaggccgttgccgcaaccaagcatggtttcgacaatattctgcgcaagctgccgtcgtcgctcgacaagcctcgttcggaacgtatgctggaaggcgcgttcaatgccatttcccgtgaggaaggcaatgaggtcggctacgatacgatcatcgcttccggcgctcatgcgccgattctgcattggatgcgtaacaccggtaccgtggagtccggcgatctgctgctgattgatgccggcgtggaagtcaatagcttgtatacggccgatatcacgcgcacgttcccgaccaacgggaagttcactgatttccagaaaaagctgtatcaggcggttttggactcccagcaggctggttttgaagctgccaagccgggtgccacgtattccgacattcatcatgcgtgcatgcgtgtgatcgccgagcgtctgcatgattggggcattcttccggtcgatgtcgaggagtcgctttctccggaaggacagcagcatcgccgttggctcgcctgtggtgtggcccatcatcttggtttggatgtgcatgattgcgctcaggcacgttatgagtcgtatcagggtgctgcgattcgtcctggcatgattttcacgattgagccgggtctgtatttccgtgaggatgatctgttgattccgccggagtatcgcggcatcggcattcgcgttgaggatgatgtgctgatgactgaggatggtccggaatggatttccgccggcattccaaagcagatcgatgaggtcgaagagtggatggccagcatggctgccgaaggtgcaaaggcctgatatgccaacgcctgaattcattctcgagttacgcaagaaagtcggtcacgatctcctgtggctgatgggcgtctccggctatgttgaagacgagcaaggtcgtgtgctgcttggcaggcgttccgataccggcgagtgggccatggtgtatggcattaatgagcctggcgaggaacctgccgacacggtggcgcgtgaggtcaaggaagagactggcgtggatgttatcgtcaccgatttggtgtcggtgaagtcttcccgcaaggtgcttacgtatgcgaacggcgacaacaccatgtatatggatcacctgttcgtgtgcaagcccgatccgaatggtaatgccgaaccgttcgtaggtgacgaggaaagcctcaacgtgggttggttctcccctgatgacctgcctcagcccctggccgacaccacagtggaacgcatgggctacgtgcgtgagtacctcaagaacaaggcgaacggcgacgcacacgcgcaattctccttcaacggtgcgattcgctgaatacagtcacaattgaatatataaactaagagctggtgtgacgatcatgaaccgtcacaccagctcttgtgtatgtcaggaagccacgaaactcacttcggaatcaaattcctttggcgagcaactcgtgcagctgggcgcgatgttttcgctgttcacgcggatcaggcaccggcagcgatgccaacaacttctgcgtgtagggattctgcgggttattcataacctgatcggcatcaccatgttccacaatctcgcccttatgcatcaccataatgcgatcggccagcatatcgaccacggcaagatcatgggtgatgaacaggcatgcgaaacctatttccgcctgcagtttcttgaacagctccaacaccttcgcctgtaccgacacatccaatgcagaagtcggctcgtcggcgatcagcaggctcggcttaagcgccagcgctcgtgccaaggaggcacgctgacgctgaccgccggaaagctcatgcgggaaccggttcatatatgcacgcggcaactgcaccatttcgagcagatctcccacatagtcgctcgcttccgacacagacgagtactttttatgcacgatcagcggttctgccacattctccgcgatggtcatcagcggattgaatgaactacccggatcttggaacacaaaaccaatatcagcacgcttgggtttgaattgacgttccttgacaccgttcatttccacacccaacacgttcagggagccgccggacactttctgcaaacccgcgatggcacgaccggtagtggatttgccggaaccggattcgccgaccaatcccagcacttcggaacggtgaatagtgaaatcaataccattgaccgccttgaaatcaggctgcgtcaaatgcccaggataggtgatagtcagtcccttggcctcgacggcaatgggttggtcatgccaatccttgctgcgttcaatcaccttgccctgctcatcacgaacgaccagtttctgcccgatacgcggcacggctgcgagcaaccgcttggtgtaatcgtctttcggcgagtagaagatctgttcgacgcttccctgctcgaccacatgacctcgatacatgaccaccacttcatcggcgatatcggcgatcacacccatattatgggtgataatcagcacggaggcgccgaattcgtcgcgggcaagacgcaacaagtcaagaatttctgcctgcacggtcacgtcgagcgcggtagtcggttcgtcagccagaatcagacctggattgagcaccaacgccatggcgatgacgatacgttgtttttggccgcccgagaactgatgcggatagtagtcaattcgagtttcggcatcaggaatgcctacttttttgaggatatccacggacttggcacgaagctccttcttgtctttcatgccgtgcgcgcgaagtccctcttcgatttgccatccgatggtgtacaccggattaagtaccgaattaggttcctggaacaccatggccgcttctgatccgcgcatacggcgcagatcttctccggaaagagacagtacgtcaagctgctcattgccttcacggttcgacagataaatcgcgccggaagtggttgccgtctccggcaacagcttgataatcgaacgtgcggtcacggattttccggaacctgattcgccaaccacacccaccacggttttgcgtgggatggtgaagctaatcttgtcgatggctttgatggatcctgcgtcggtcatgaaggaaacgctcagatccttgacttgcgcaagattggtttgttcgtcactcattgcgtcactcttcttccttggagccccattcggaggcggtaaatgacgggtcgcgatccgtaacggtcactggctgatcgctggctcccattggattcttggcggccgcgagctcggctatcacctcgttgcgaacgcccggcttctggctgggatcaaccgaagtatcttcgatggatccaaccacctcaccagcggatttgcgtgcacgcagacgcgggtcggcaaggtcattgagggattcgcccaccaaggtgatacccagaacaatcaatacgatggcgatacctgggaacactgcggtccaccaaatgcccgcggttacatccgacacggaacgattcagatcgtaaccccattcagcggctgcggtaggctcgatgccgaatccgaggaagcccaatcccgcaagagtcagaatcgcttcggacgagttcaacgtcagaataaccggtaacgttctggtggagttcttaagaaggtgcttggtcatgatgcgccatgtcgacgcgcccaccacgcgagcggaatcaacgtaagcggattccttgattcgaatgacctcggatcgaatggtacggaaatactgcggaatatagaccacggtgatggagatacccgaagcgagaatgccactccacagaccagactgaccgccggaaatcataatggccatcagaatcgcaagcagcagcgaggggaaagagtagatggcgtcggcgatcatgacaagcacacgatccacccaaccaccgaaatatccggaaaccaaaccgagcaatacacccgcgaaaatagaaagcagcacagcgatcacaatcgcaatgaccgcggtacgagagccccaaatcacacggctgaacacgtcataaccacctgcggtggtaccccaaatatgctcggatgagggtgctgcctgggccgggaatgaaactccattggcatctttgagctgcgcatagccgtacggtgcaattacgggcgcgaacaaggccacgagcaggaagaacgccgtgagcaacaggccggtaatcagcatgcctttctgccagccgaccgctacgcgaagctccttgatgatcggaatcttggcccagaacggagctttcctgttgactttgagatcgttcagacgagtgtcacccgggacggtgacgttatttgctgatgcagtcatgtcagtacctcactctcggatccaccaacgcggcgataacgtcaacgatgaagttgacgacggccacgatgatggcgatcagaatcacaatgccctgcacagctacgaagtcacgcgctttcagatattgggacaacatgaatccgagtcccttccattcgaaggtggtttcggtaagcaccgcgccggcgagcatcaatgcgatctgcatgcccataacggtgatgattggaataagcgccggcctccatgcgtgcttgctgagcagacgtttttcggcgacgccacgcgaacgcgcagcctcgacatagccggaattgtaggtggaaatcacattggtgcgcaccaaacgaataaacacgcctgcggtgagcaatcccaacgccagcgcaggaagcacggcgtgacgcaacacgtcggccagcacgctcatatcacccagctgcagtgcatcgataatgtagaagccggtcggagagacgagtcgggtgaactgcatttccgaagacaacgagcatcgaccggatgccggcaacacgttcagccagatggcgaaaatgagtttcaggaccaatcccaagaagaacacgggggtggcgtagcacagaatggcaaaggttcgaatgcctgcatcggcagcgtgatcgcgtctgcacgcagctacacgacctaagccgatacctacgatcaaagcaacaatgagcgataggagcgccaactcgaaagtcgctgatccgtaatgaacaagaatgctgataaccggctgattatcagtcaacgtagtgccgagatccccatggagcaaacccccaaggtaatcgatatattgcacaataagaggacggtcgtagccggccgcatgaacacgcttttgcaactcgtcaggggtaagacgaccacccaatgccgcagaaataggatcgcctgtagctcgcatcacaaaaaacacgacggtgacgagaatgaaaacggttggaataatgagcaggaatcgagtcaggacgaaacggaaaaatccgcctgacaaatgattctttttggcttgtttcggcttcgcctcctgagagacggccggagctgctgtgtctgacacgcgatgctcctcgataagaagcctgtacggctttgatttacaacaatatcgaattactgcgccgtttcaggcagataattcgggaaatggggacctccggccatagaccggggatccccagtggttttctatgcaggctgcggcaggtcatgccgcacatccgcacacatcacgccttggtgacagatgcgaaacggaaacggaaggaagcgtcgagcacaacacccttcacgttggcgccggtaactgcaacctgcgcaccctgcagcagcgggatggtggacaggtcttcggtttcaagggtctgaatcttcttgagcagatcctcacgggcgctttcgtcggtttcaccagcctgctccataatcaaatcgttgatttcggagttggagtaagcgttgttcacgaagttgccgtcacggaagaacggagacagatagttatccgggtcggagtaatccgggaaccagccgagctggtagaccgggtaggatccatcagagtcctcggtaacaacacggtctttgttgtactgggtccattcggtggactgcaggtcgaccttgaacagaccaccctcctcgagctgagccttgagagccgcatactcgtcggcggaagaggatccatagtggtccggattgtactgcagcttgagctcaaccggagtggaaacgcctgcgtcctcaagaaccttcttggccttgtcggcgctcggcttgccgttgccgtcaccatacgcggtcttgaaggtgtcttcgtgaccaactaaaccgtccggaatgtaggagtacatcggggtgtacgtgtccttatagaccttggtcgccaactcctcgcggtcgatgaggttagcgacggcctgacgcacagccttggccttgtcggcattcggttcatcggacttggtgccgtacggctggatgttgaagttgaagaccaggaagcgttcctcaccgcccggacccttgacgaccttgaccttggagtccttggacagatcatcgatgtcggtcggagtcagagaacggtaggccacgtcgacctgtccctgctgcacggccatcttcaggttggaagaatcggcaaagtacttgacctgaacagtgctgttcttggccggggtcagaccctgataagagtcgttcttggagtagcctgcaacctcattggccttgtaggaggtcagaatgtacggaccggcgaaagccttctccttgatgatggtgtcagcatcagtgagcttgtcggcggagaagacctcttcgtcgacaattggaccggccgggctggaaagcacctgcttgagggtcacatcgttcttgactttggaatggaacaccacagtggtgtcatctggcgtatcgatggattcgatgttggccagcaacgaactcggaccattctcatcgttaatcgtgttgacacggtcgaaggagaacttgacatcggacgaagtcaggtcgtgaccattggcgaacttcaggccagacttgatcttaacggtgaactcagtgccgtcgtcactccaggtaccgtcatccgcagcgatgtccggagacagttcagaggtgttgtagtcctgcgcatacaggaacgggaacacgttgatttgaacggcataggaaccgttgtcataggagccggcagggtcaacgctagtaaccttgtccgtggtgccgacggtaatgacatccgcatcccccgatgcggaaccgctatcctttacgccgccgcatgccgcgagcgaggccagtgcggcaatcgaaacagccgcagccataatcttcttgtgattcactatggaatcctttctcttcctgctgtcgtaattggtactccaaaacgacgtgccataagggtagggcacactttgttagcgaaacatttcacggaagctcattttgcgacatcaccctttctcgatccaacgaaaactcagcaatcacaacggttttgcagttaatttttttccgaaaagagtgtgtcaaataatgagacagcgaatcccatattgagaatcgacggccctcgtgacacgccgaaagacggaacttgcatcaactaattaacggcgttaatatatcaactagttcaacgaagggtccgtgcactggcgcaaggaggtgtcatgagtagttacagcgctcagcaatcatcgatttcagaaaacaatcgttccagaattctgcaatacctctaccacaacggcatcagctcacgtgcgcaaatcgccaaagccatcgaactcacacccgcggccattacgaaaattaccgcaaaactactgttccgagacgttatcgaagaaaccggagacatggaaggcgataagaatcgtcgttccatcggcctgaatctcaattgcgcgaaataccatgtcgtcggcgtgaaattcgcacgaagtctggtgcagatcgcagtgttcgacctgaaatgcaatcgtatttccctcaccgacctgcccaccgttgacgaggagcatattcccgaaacggtagagcggatccggaccaccgtacgacagctcattgcggacgattcgagcatcgtagccgtcggcatggccgttcccggtccgtatctggtggaggaaggtcgcaccgcgctcgtctcatccatgcagggttggcggcaggtcaacttcatcaaggagttcagcgaagcgttcaacgtacccgtattcgttgaacaggacgcacgcgcaggcgccttggcgcagttcctgttcaacccggaactgtccgagggatcgctcgcctactatctgcttggcgagggcatcggcctcggcatcatcgacaatggttcgatctattacggcgcgcacggcacggccaccgaaatcggacacatctccgttgacgtcaacggcaagccttgcgactgcggcaatatcgggtgcctggaacgttactgctcagccaacgcaatccacgaacggctcaacgaacagccgagcattgtgcccggatgcgaggcaatgacgcacgcgcaggcatgcaccgcgctgttcgccaaagctgcggcaggagacaaagcggccatggatctgacttccgaggtcgctcgatatatcggatatggcgcggtcaatatcatcaacgccttcaatccgacgcatatcgtactcggcgacatcatctcccaagccggacagcccttgcttgacgaggtctaaaaagtcgttcgggaacgtaccatccccgaagtcgggcacgataccaaaatcaccttgtccaacctcccaacggacgccaccgtcagcggtgccgcggccgtggccatcaccaattttctggaacatccttcgatgttctttgacgtcgcatagcacgccacaaccaaagaaaggaacaccatgtccaagccaatcgtcatttctctcggcgaaatcctgtgggatatgctccccaccggcaagcgtgccggcggcgcacccgtcaatttcgcataccatgcgtcccagaacggcgcggaaagcttcgccatcagcgccgtcggcaacgacgagctgggtaccgaactgctctccgacgctcacaaggccggcatcaacacgctggtgcagaccaacgaatacccgaccggcacggttgacgtggccctgaccaacggcattccggaatacaccatcgtcgaaaacgtggcttgggaccacatcaagctcaccgacgagctcgtcgaagccgtgtccaaggccgacgccgtctgcttcggcaccttgggtctgcgctcccccgaatcccacgacaccatcgtcgaactgctcaagcacaccaaggaaggcgctctgaagttcttcgacatcaacctgcgtgcgaacttctactccaacgaactcatcgaagaactgctcggctatgcgaacatcttcaagatcaacgacgaagagctgatcatgatgcgcgacatgttctccattcctgagtgcaacgacgaagaggcatgcaagtggttcatcgaccgcttcgaccttgagtacaccattctgaccggcggcgccacgttcagcaccatcaccgccaagaatggcgaggtttccacgctgctgacccctcacgtcgaggttgccgataccgttggtgcaggcgactccttctccggttccttcaccggcaagctgctgagcggcgcaccgctcaaggaagcgcatcgtgcggctgtgaacaccgccgcctacgtgtgcaccaaggaaggcggctggccaacctaccctgtggaaggcgttccggattatctcgccgaagccggcaagtaagcccagattttcctttcatcatcatcaacgaggccatgtctgccatcatggcctcgtttttcatacccatattcaatccgcaattggtgcaatcacgattgtcacgatatacgcacctcaacgaagaatgatgccatgaacgacaccagcaacaccacaaacgccgcttcacaatccgatattccgcagtcagtttccgatttcatgcggcatatcaccgacttgtgtggcggcgaacacgcaagatgggccgaaaacttcaacgcaggattcgccaatacactcaccaccaccgtgagacggcatgatgacggcacgacgtttctgctgacgggagacatacctgccatgtggctgcgcgactcctcagcgcaattccgaccatatctcgccgtagccgtagatgatcccgagctcaccgcgcttattaccgggcttgttcggcagcaattcaggttcatcaatatcgatccatacgcaaacgcgttcaacgaaacacccagcggcgctacctgggatccgaacgatcagaccgattcgttcggaccatggttgtgggaacgcaaatacgaggtggactccctgtgctaccccattcagctggcgtggctgttgtatcgcaatacaggaaccaccagccatttcgatgatgcgtttgtaagcggcatccgtcgaatccttgacgtgttcgaaaccgagcttgaccattcgaattcgcattaccgcttcttccgtccgaacgacgatccgcgcgacagcgtgcccaaccatggtaccggaggaccttttgccgtcaccggcatgacatggtccggattccgccccagcgacgacgcctgcgtctacccatatctcgtgccgtccaacatgttcgccagcgtggtcatgggatatgtgcaaaggattttcatcgacgtgcttgacgatcgtgaaatcgccggtcgtgccgcggcgctgcagcattccatcgatgatggtcttgcccatcacgcaaccatccgcaatgcggccggaaacgctatctacgcatacgaagtggacggtctcggcaacgcgttgcttatggatgacagcaatgtgccgaatcttatgtcggcaccttatctcggattctgcgaagcggacgatccgctgtatctcgaaacgcgcaatactttgctgagtcaggagaatccttactatttcgagggtgactatgcacatgccatcggttctccgcatacgccagaaggttatgtttggccgatcgccatggccatgcaaggattgacaagccacgacaaagccgaaaaagaacgtattcttgatcaacttgtcgccgccgacgccggcacgcatctcatgcatgaaagctttgacgcgaacgacccgaactcctatacccgtccgtggttcagctgggccaatatgatgttctgtgaattggtcatggattatttcggtattcacgtcaagctgtgagtggctatcagtttaagctttggcttcgctcacagcgcaagaattacggtagatgatttgcacttattgacattccatgatatcttaaaaagtccggtcttgcaccgggtgcttgataattcaagattggggatgatcggtttcgacggtgacctgttcgtcgcagggaagcgtgccgagaacgtagggtccgctcgtggatgccccctacaaaagaataagtgctaaatctaaccgcactgagttcgctctcgctgcctgagcttcgcgccaggattaaccagtgagcagccgctccgttcactccttctcgtctttggaaggatgctgagcgtcgtttagaagacttgctttgtcgactgagccacagggccggcaagggacttttactgtagatatgcccgccatcagttgtctgcgatatcgatgggagcagaaaaaccgccgcacggccagcagactacgcacgtagaagactgagggttcggttatcggaccggggttcaattccccgcatctccacgagttgaaagccgccagaaatggcggcttttcttgtatttccaacggttttcgaagattcctgggtttactccaaattacccctgatgtgccggatgttctaaaaaaatgtgggcaaaaatccctcctccggcttgcttaatctcttccaaattccatctgtctaccaccctaaacagcatgcaaggtacgtttttaggtactcctcttcacaagacaacctcgtcaaatcaacatacgaaaaatccagctctccaccatcacaaatcatcagaatcccaccatcaaattccgcgtgtcgatttgcattaaccgcttaagtggttaacatagttaatacatcaacctagttatcacgtcacagcagacgacgtcaaggaaggacttgatcgatgacctgcacttactctcccgaagcctacgtgttcggctccgaagaaaaccatgccctgctcgaggcggaaaccaacgagctcctgcatttcgggcacaatttccccgccccgcagggtggctcctactggctggacgataccggcaatccggatctgacccaaaacatccacacgtggatcacctgccgcatggcgcacgcgtattccttggggttcctgcacggcgagccgggcgccgcagaactggttgacaaggccatcgccggcctgcgcggtccgctgcatgacgatgaaaacggcggatggtatccgtccatttccgcagacggctccacccatgaagcaggcaaggtctgctacgcccacgctttcgtgattcttgccgcaacttccgccaagcttatcggccgcccggacgcggacgagctgctcgaagaggctctggcaacctacgacaagcatttctgggatgacgagatcggtctggccgtcgatacttggaacacggaattcaccgagcttgactcctatcgcggcatcaatgccaatatgcacaccaccgaagcattccttgccgttgccgatgtgaccggaaacgaggaataccgcgagcgcgctggtcgtatcatcgatcatgtggtcggatgggcagccaacaataactggcatattcctgagcatttcaccgccgattggcagccggatctcgaatgcaaccatgacaagccggatgaccagttcaagccgtacggcgccactccgggccatggcatcgagtgggcacgtctcatcacccagtatgcgttgagctccaagcagcgttccgaagaaggcaagcagcagcttatcgaagccgccgagaacctgttcgctcaggcacttgccgacgcctggaacgccgaaggcaccatcggtttggcttacaccaccgattggaacggcaagcccgttgtcaccgaccgcatgcactggacgcttgccgaatccgtgaacacctcggccacactggccaccgtcaccggcaagcaggtgtacaaggattggtatgcgaccttctggaagtacattgacgaatacctgatcgaccataagaacggttcttggttccaccagctgaacaaagacaacgaggtcatcggtaccgtctggccgggcaagtccgacctgtaccatgccacgcagtgcacgctgattccgcgtctcgatcccgcggtctccgtcgctcctgcgttgaaggccaatccgaacgcctgacggcctccaataatcgaacttctccttctctcctcctattcgcgaagaaccccggtaccgcaaggcaaccggggttcttcgtatatcaacgcgactatttgatgattggacgcaacggcgcagacacgtcgacgttatgcttgtctccgatcacattcggatcattgatgattttatcgacgacagctttcttcaacttgaggccggatgaatcgccccatacgatcacacggtctcccccattgatttccgtggtgatggaatcctgggtttcggcagtcaccttggtgatggagttgcgcatcgattccggcaatgagctgaggatcttcaacgcctccttgatggaacgattgctcagacttgtttcgacatccttcacttcaatgacgggaattccttccacggaagctccgctgacggaattcaatatacgccccttgctgtcgaccgcggtcatgctgtcctcgcctgtcttgagcatcgcagcaggcttttgcgccttgatggtcacttcaagggagtcgggcagttttttcttggattgcgcggaagtgactcccggaatctccttgattttcttttccacgtcattgttcgacacgagaagaatcgattttcctgcttgctggcccgcaatatccaacacctgagactcactcacccattcgttggcgccgacaacgctaatattgccggactcgagacggaataccgatgagaagaaaaacagccataccaacgcgcctgcaacaacaatgacagcagcggaaacgcacgcgcgcatggcgacgacacgcgcgttcgccttgcgtcgttctttcagacgcgcactgaaatcaaccaccttcgggcgcgttaccacgcccaacgtgcctgtggtttcctccaatgtcttcgaaacgaaatcctcgccggcaagattgcgcgcgtccacgaaatcgcctgatctcgaacgactcacgctgcctttgttgccactctcaaccgtattttcctgcgtcttcttcccggaagaagacgcgcgtcccgctccaccagcgacggaacggcctttcggctgaacctgctttccggcatcgctgtgtttccggctttggatggttctaccatgcgacgtctgattttcaggcgtcgttgcggaaccatccgaacccgtacctgaactgatgacccttcgcgtcatcagccctcacaatcccaacgatgagcctgaagggagtgcagcatcacctcgtccatctgtgtgatgtcgcctgcgccaaccgtgaagatgacatcgccatgatgagcacgcatcgtcatcatctgtgccgcggtatgcatatcctccactccgcgaatccaatcctcggcaggcgtgtggtcaagcttaagcgcctcgtccacaatggtggcggagctaatcgtcggatagtcctcctgcttttcacgtgcggggaaaatgccggtgacgatcacatcatccgccttggccaatgcttcagcgaattcactcgcaaagaacatggtccgggagaacaggtgcggctggaagatcacgcgaatcaccgactgcgggtacctgcggcgcgccgcatccagcaatgccgaaatctccgtaggatgatgcgcgtaatcatcaacgacagtcacttggccgaccataccacgcacttggaaacgacgggcagctccaaggaacgacgtggcggcttgggcagcgttctcgacatcgacgcccaacaacgcggccgcaataatcgcagcggaggcattgcgcgcgttgtgaatgcctggaacggtaagcgtcaccggaaccatacgctcatgttcgcccaacaatcccgcgggcatgtgtaaggtgaaatgttcggcaccgctttgcgcgctttcgctttccgattcgatatgcacgaacgcggcaccgttcaaatcacccaacgaaaccgtatcctgcgtcgcatacacgaccgtacgcttggccgtctgcggatcgagagcacgcaataccgcaagattgccttcatcatcgccgcacatcaccaccgatttttcggcatgctgaacatgattgacaaaagccgcacgatagttttcctgcgtgccgtaatggtcgagatgatcggcttcggagttggtgacaatggcgatttccggatgatacttggcaaagctgccatcggattcgtccgcttccgccacaagaacgtcgcccttaccagcatggcctccgtcaatcgtcacaccatccttgccttggatggatccgccgatggcatagcttggatcggccagatttccctcaccggcatgggtgaggatatgggccagcatggaactggtcgtggttttgccatgagctcctgcgaccgtcaccgcacgttttgcgttcatcagcaatgcgagaatgtcgctgcggtgcacgatgcgttcgcctgcttcgtatgctgcgacgatttccggattgtcggatttgatggcgctggagaatacgacggtatgtttgccttcgacgttttctgcgcgctgcccgaattcgacggtaatgccgattccctgcagacgatcggttttggcgctgggttcacgatctgaaccgtccacttcaacgccctgttcgtgcagcatttcagcgagcacgctcatgcccgcgcctccaatgccgatgaaatgggttgcccccaaatcattcacgccttcctgcggactgaacgacgcatgggttggatcaagaacgatggtaccggcttcacgctggttgtcagacacgactgctcctcttgcatgttttttctagcttgttccattatggtctcacccatggtctcgcatatggccgatcatgggtgggattttggaatgcgacgaacgcacctgccatcgccgcagcctacttttcgtcaatcatggaaagcacgcgcttggccatgacttcggcggcatctcgaataccgtattgccaggcgttgtcgccatacttggcaagcagatccgaatcggcaagcagcttcggcacatgctgtttgacccattcggcggtgaattcgcgatcagccaccatcagaccgccttccgcatcgacgacaggctgggcgttgaatcgctgctcgccgttgccgattggcagcggaacataaatcgcggggagtcccaaagccgtcaattccgatacggtgccggccccagagcgacagataatcaggtcggcgcaagcgaatgcgagatcaatacgttccaaatacggcgcaacacgataatcgccatcattgccatggtccgggccaagctcgccaagcacctgttcgccggcgctcaccgacaccaatgaacgcacttcatcatctttgcctttcccagtcagatgaatcacctgggcgtgttccagcagctccctagcggaagccgccaccgcacggttcacgttcaccgcgcccagcgaccctccagtcaccaccaccagtggacggttcggatcgacaccgagttgcgctgcggccgattgtcttgtggcaatgcggtcatgttccatgccatgggctatcgctgcgatttcggcacgcaatggcaatcccacacgctcggcttcaacacccttgcgtggcttcaagccggtttgcgcataggcggtgccaatcatggacgcccagcgagctcccaatttgttggccattccggcacgggcattctgctcatgcatcgcgatcggaatgcccatcttgtgcgctgccgcatatacgggagcggacgtgtatccgccgaagccgacaaccacctgcgcctcatgacgggtgagaatgtcacggactttggccgtttcggccttccactgcgcgggaaacttcagcgctgccatattgggcctgcgtgggaaaggaaccttctcaatggtttccagttcgaaaccggcctggggaaccaaatcgtgttccaagccgacgacagtgcccaccactgcgatatcggcgtctggttcaagctcgcgaatcacatgcgccacggcgagcagaggattgacatgacctgccgtaccaccgccggcaagaacgatatgcttctgattgctcatagtgtacgagcttagcccacggcaccccagtacgccgcgcgccataccgtcgcacacgcggatgctcacatttcatctacgtttgcacaccgcaatacgcggtagcgtatgctacggtcgcagccgacactcagacccgctgcatctccgcttggatctgcggctgctgcttcatcatgctgatggttacgcctgcagcgcccaaacacagaatcaacgacgaaccgcccgcggacacaaacggcaatggcacacccatcaccggaaacaatcccaccacaacgccgatgttcacgaatgcctggccgacgatccacacggtaatgctggccaataccaaagtgatgtacctgtcctgcgattgcaaagccaccacgagcatgcaccatccaagcaccaagaacagcagaatgacgagagaggcgcctacaaagcccgtttcctcaccgatgatggcgaaaatgaaatcgttgtgcgcttccggcagatatccccatttttctccggaattgccgatgcccactccaagcaaacctccggaggccatggcgtatttgccatgcaccgcctgatagcagaccccctgcatgtcggatgcggagcaagtttggtatgtggccatgatgcggctgagtcggttcggactggtgataacgagtccgccaaccaaaaccgcaccgccgcatgccacgatagccaaccatttgccaagaaaatctcccaacagcaacgcggcacctgcgatcgcgaacagaatcatggccgtgccaagatccttgccactcacaaccaacagcaatgcaagaccaagccacgcaatcaacttgagatatgccttatatggtccgactttgtttatctgcttctgcgcgtagatcagttcccgcggcagccatatgcacaacgcaagcttaacgacttcggcgggctggaaggtaaatccaaaaaggccgatccaacctttgttgccttggacatcgatgcccaagggggtaaacgtcagcgactgcaaaagcaaagcgataatcaggaagacgaaactgaatttcctgatgagctccgccggaatcatcatgcaggcaacacccacgataagtccaagaacgcagaatcccccctgtttcagtgcttgggaccacggagactgtccgttggcaatcatgtttaccgaagagctggaaaacaccatgatcacaccgaaaatggtgagaatgatcaccgcggttctgaacccatgaaaacaccaaatcggattaagcaggcttcgcagaccgatataaccatgaaaatcgtcgacctgctttccgacggcggccttctttttctgacgactactatcaacctgcctggttttaggcttttccatgctcgttcacccaacgctgagcctgctgtgcgaactggtttccacgatcggcatacgacttgaactgatccatcgacgcacatgcaggcgccatcagcaccacatcaccggattggacatactcgcccgcggcatcaaccgcccgttccataatgaccccattatccgccggatcgatgatggtcagaggaatgttgggagcgctcgtcttgaacgcatccagcatcggctgctgatccctgccgatgatgaccgcggctttgatggtatgcgcctgatcagccaccaattgctcgaaactgctgcctttggccagtcctccggcaatccacaccacggatttatcggcaaaactattgagcgaggccttggccgcatgcgcgttggtcgccttggagtcgtcaacgaaacgaatggctcccccatccgccgtagtggcggtggcgacggtctggatacggtggccacctggagtgaactgcttcagggatgcgatcgccttctccttatccgcgccaagtcccaacaccaacgccaatgcggtcaatgcgtcggcgagcaaatgcggatataccgtgccatccggctcggtcagatgtgtgaactcggcaactttggcaacctgttcaggcttgcccgcctcaccgcccgcgatgccggacatgtcgacgatccagccgtccttcacgccaatctggccatcttgcggttccgacaatgtgaatccaaccctacggcagccttccgcggtttcggctgcgaatgccagcttggtcacgcgctcatcatccgcgttgtacaccaacgccttcttggcatggtggaagaccttcgctttatcggacgcgtaattgtcgataccgccatgccaatcaagatggtcgtcagcgatattggtgatcgccgcgcaatccaactcaagagaatcggtgaaatgcaattggaaagaactgagctcaacacacagcacatcatttgccggatcgactgcggcatgggacaccgctttgccgatattgccgacagcaggtgcggtcaaaccgcaagccgtcaacatctccgaagtcatttccgtagtggaggtcttgccattggtaccggtgatgccaatccattgcgcaggatgcccagtggcatcgcaatccacccgcagctgccaggcaagctcgacctcgctcatcaccggaatgccacgacgttgcgcttcgagaatgaacggggtcctcggattgaataccggagaagtcatcaccaagtcgatatgatcccaatcaatgtggtcgaaagagtgcagatcggcatcaggcttcttctcatccacgcccaacaccttttcggcgcgggaacccaacacctccatcatgctctggccagaaactccaagacccgccacaatcgcggtcttaccgctcatatccatatccatcatccttcgatcgtcagaacctcatacgccttaatatcacagtcatattgcgttcattcgcaacggcaacagaccgagcatcgactgtcacaagccggaacgggcaacccaatcgccatagaaaagcaccaaggcgaccagcacgaacagcagttcaatcatccagaagcgaatcacaaccttgacttcgggccatcccttcaattcgaaatgatggtggatcggagccatcttgaacacacgcttatgcgtcatcttgaaatagccgacctgaatgacatcgctcaacgtttccatgacgaacaggccgccgagaataatcgcgaggaattccgtatgcgtggcgatggacatggcagcgaacaggccgccaagcgccaacgaaccggtatctcccatgaaaattgaagccggattggagttgtaccacaggaacccgaagcatgctaccgccgcgcaagccgcgataatggtcagatcaagtggatcagataccgcgtaggtaaagccctcatgccccgatcccttaaggtggtagaactcccaaaaagcgatcaccgcatatcccatgaacgcaatcatcgaagagccagctgccaaaccgtcaagaccatcagtcagattgatggcattggtccacgcggtcatcaggaagttcacccaaatcacgaacagcacgatagccacgaccttacccgcgaattcgaaactgaagaacggctcctcaatgaagctcatgccggcctgggcactggggaaaccggaattcgtaggcagaatcaacgccagcaccgcatatatggtagccagaatgaactgaccgatgaacttgcccttaaccgtcaatccctcgctctgcttcttacgaaccttcgcgaaatcatcaataaaaccaagcaatcccatcgacaacatggcaaacagcaccagcaccgcagaccacgacggagtctcaccccgcgtgacgaagcggtacagcgccgacgagccccagcccaacacaaccgccaaattgatgaccacgccacccaacgtaggcgtgccacgcttgactagatgggatttcggaccatcctgacgtatgtattgcccataattcagcttgtgcaccaaacgaatcagcagcggggtgcccacgatcgtcacaaccagcgacaccacaattccgatgatgagcgaaatcacctgatgttctccgtttcagtcagacattcttcagataacgtcgtttattcgattattcgaatcttgccaaatattcttgttctattgtgcagccagggcctgccaacgttcggccaaagcgctcaagccggaagcgtgggagcccttaagcagcaccacagcgcccggatgttccacggcgagttgcgtcaccagacgatcggcctcgtcaatgtcgtgcacccaatcaatatgggaagcacatcccgcagcggatgcaccttcagccatggcaccggccagagcgtccaaagaggcatcggatgtgctgccgaccgtcagcaacgcgtcaacgtcgccttccaccgcataccggccgatgccagcatgcaaatccttttcatccggaccaagctcaagcatggcacccaacaccgcgatacggaacggttgggtctcagcacccgccttccaacgcaacaatccgtcaagccccgccttcatggaatcgggattggcattaaacgaatcgtcgatcaaggtgaacgatgtttcaggcttgtgcaccgtggaaacagccatacgatgaggactgatggccgtgacgtcagacagcgcggacgcgacctcatccatcgacatacccaaatgcatcgctaccgaagcagccgccaacgcattcataacgttatgctgaccgcaaatgcccagagtgacctcggcatgctcgccatcaccattgtccaaaatgaagctcggatggtccaattcgtcgcaatgcacatgttgcgcgctgattgccggcttgccgtcattgttctgcggaagtccgaaccacatcacgtcgcccggagcgatggcgctcatcgcagccacatgctcgtcattcgcgttcagtacggaaagaccacctggaacaagaccacggatgatttccgatttggcttgtgcgatgcgttccggcgagccgaattcccctagatgcgcgacgccgactttcaacacgaccgcaatatccggcggcaccagcgacgtcaaattcgcgatttccccaacatgattggcacccatttccgcaaccagaaagcgagtttccgcatgtactttgagcgaagtcagcggcagtccgatttcattgttgaacgatccgaccggcgcaatcgtcggtcctatgtgcgccagcaacgccttcatgagatccttggtagtggtttttccgacggaaccggtgatgccaatcaccgtaaacggcgtttccaacgcacgccggcgttcgatattgtgcttggccaacgcgcccaaggcaagcaccgtatcttccaccacgatctgaggcactccggcaccgtcgatctcatggtcgactattgcggcaacagcgccctgagcgcctaccttcgacacataatcgtggccatccacgcgttctccggcaatcgccacgaataccgatccttcaacaatctgtcgtgaatcagtgaatgtgctggtggccacaggcgtatcaatcgctgcggtgccggcaatcagccgtccctgaaccgcctgggcgatttcctccaagctcattggcatcatggtcgggctgctcactctgatttctcctctgtgttgatgtactgcatattgttcacgttgtttacgattatcactattcgacgtccgcatccgttccgatcgagactagttcagatctcgagatacacgcaatgcgcttttaatattggctttacgtacgccggccgcaagcaccatggcgatggacaatgacaacgcgctgctgtccgtctgcccgtatgcctccgtcgcttgcgctgcgagcgcatcggattcctgcgtacgacctgcgatgtgggtctgcttgccgacagtgcatccaaaccgtgcgaccgacttgacgatctcagcctcgctgagacccttgtcgtcgcagccaagcacatcaacattcaccgactgcaacgcatcgtcattcaacgtttcctcgctgagcgcaaggatcacagcggcggcgccgtcttcggcgcacacagccatcgtacgctgcacgtcaagaatcgacaatggatagttcagatcaaggaatcgttccaacgattgcgaattgccggcactaatcacgccgaccggattgccgagcatgtgcaggaaatccgcgagatccctcacaccctgttccaccgtttgcgtattgctgccagccacggcgaacaccgccagcgaatcggatgggctgcccgccatctcgctggcaagcttgcccaactgttgcgcagtcggttcggcataaatcaaaggaatctgaacgccatccgtttttcctcgcaacgcatgcggcaccaccgcaccatacgcaccaagcgcttgcacctgccgtaactgttgctcatccacctgcatggacggcatgaacaacgctcccggccgcaccgaatcgatgtcgtcggcaatggacgtgaccgtcacttcggtagcgaacgcgggatcaaggtcaaagccatatctgctggcaagcagacccaacgtcattcgcctattcatggattcgctgaccgcgctcatctttccgcccctccgttcttcatgctcacacactcaccaagtcactggaatagcatcagttcgcggacttgacgccggcacttcgtacttctgcataaggaattcaccaatctccgcagtgaccgggcctgccgtcagaccaccataaccgccttgcggatctttcaacaccaccgtaacgacgaaacgaggattatccgcaggaataatcgcggaataatcgctgataatcgacgacagacgtccgtccgcaccggcaacttccgcggtaccggactttgccgcgacacggtaaccatccactttgacgaactgggaatagtggtcggacacggattccatggcattcatcacctgtgaggccacctgctcgtcaatcacgcgcgtcgcttcgccttcaggcttctgctcttcggaatgcccttcggcatcgctgatcgccttgatgatgcgctgcggctttttgacgcccttgttggcgatcacggcaaccgcgttcgtcaactggagcgcattggtcgtatacgcctggccgaacagcacggtgttctgggttcgcagatcccattgatcggccgaatacagcagaccatccgcttcgccgggaagaccaagcccattgtcttgtccgataccgaatttgctgatgaactcatatcgctgctcgttagacatcttctccgcggcgatgatcatgccgacattcgacgattgctcgagaatgcctgccagcgtccaatgctcatcgccgtgggtcgtcgcatcgctgtaggtctgcccgttcgtcgtaatgtggtccggcaccgtgaatttatccgatgcctggtgcaatccaagctgaatcatgcctgacatggtgaaaaccttgccgatggaaccgggttcaaacgtttcgctgacggccctggaaaccgtcattttcgcctggtcgctgccggcttcgatttcgtcgctatcggcgagcgcgagaatgtcccctgtttgtgtgtcctgcaccacggcgactccccacggtgaactatatttcgtgcagctttccttcagcactttttcgacgtaccactgcacgtcatggtcgatggtcagtgtgacatcggagccgttgaccgcgtcttttgattcggtcatggttccggggatttcgacgccgttgttgccttgttggtagacttggtacccgtcttcgcctgtcaacgtcttgttttccatctgttcgatgcccgctacgcctttgccttcaccgtcgacacctcccagcagtgcgcccatcagggttccgttggaatagatgcgctcgttgctgagttccgcgtagacgataccgcccagattgagtttggagatcttgcgcttaacggccggcgtcacatcttttttgagtaccgcatattggcctgttcccgaaagcatggcacccaattcggtggcgtccatgtccagtaccggagcgaggagtctagctaccgccgcagctccggtagcacctaccggcttgccatcgatctgatggcagttgtctccggtctgtttggtgcaggttgtgggagtgaaggcctgtgcttcctcggggttgccgatgatggtgtagcgctccacgctttgcgcgagaatcgagccgttcgtgtccatgattttgccgcgccgtgccttcaaagtcacggtaatcgtgcggctttgcgccgcggcctgcgccatggttttgccattgatcaactggatgttggccaattgaataaggcaagccgtgcccatcaacgccagaatgacgccgatggccatggttttcgtaagcagtttcttgtggaaacgtgcgtaagtgcggtgaaaaggattcactgagcgtcgtctccgcttggctggtagccgttcagatcaatcgttagagcgcctttttggggcaccatgcccatttcctcggccttgctcggcagcgaggcttcaagttcgtcaagcttggcctggtcatcttccacgtcttgggtcaggcgggtaatgttcgactcaatctggttcgcctcgaaggaatgctgcaccatttgggtacgcagcgttaaggatcccagaagacatccgccgaggaacaccacggcgataaccagatgcaacaatggagtgcttctggtgcgcgtccatgtgatgagctgttcgaatcctcgcttgacgctgttgccttcggcccgcgttcctttgacgacgtgcaattcagggcgagtggtgccagcggtttcggtttggtcccggcgtcctgcgggagccgcgtttgatgcgatcgttcttggtgcggccacgttcagcccctccttccttgtcgtttcatgcttgcgtaatcattgccttggtcgaatcgttttcgccagcgttcaggaattggtctggtcagttccactgcgcgcagtcgcacagaggccgaccttggattcatggcgatttcttcctcggccgctttgatggcgcctcgcgtcagttctttgaagaacggcatcatatccgggggtattaccggcatatctgcgggcacgtcagctttcagaccttgattcataaatgttttgacggtcttgtcttccagcgaatggtacgactccaccaccaaacgtcctcccaccgcaagatggttggcgatctgcggtagcgtccccgccaatttgtcgagctcgccgttgacttcaatacgtaatgcctggaacacacgtttcgcgggatttcccgcaggacggtgcgcttgcggcacaacctcatccaccaatcggttgagctgccccgatgtggtcaatggttcgatctcacgcctacgcacgatttcgcgggatatctgcttggagaagcgttcctcaccatatgtacggaaaatgcgtaccagatcagcgaacgaatattcagcaagtatctgttcggcggtcaatggctgggtcacgtccatacgcatgtccaaaggcgcatcgtgagaataggagaatccccgctccgtctcatcaatctgcaaactcgacaatcccaaatccatgaacacggcgtttacctggtcgatcccctgatcatcaagcacttgcgcgaaatcgtcgaatgcggcgtgcacgggtatgaagcggtcggcaagaccttccatccgcattcgctgcgtggcgagcgaaagcgcctccgtgtctcgatcgatgccgatcagacgcgcttgcggactcgctttgagaaaagccgtggaatgccccgccaaaccaagcgtgcaatccaccgcaatcgaccctggcctcgccaacgccgggaccaccagatccacgcagtcgcgcagcaacactggctgatgtatggtcgttacatctgtcatcagaattccaccgccggtaatacgtcatcggcaatatcggaatatccctgctcctgttcggcgagatattcctcccatgcctgcttgttccaaatctccgctcgggtccccacgccaatcaccacgatgtcgcttcccaaattcgcgtaatcgcgcaacatctgcggcacgagcacacgtccttgcctgtctggctcctgatcaaccgcgccggaaaggaacacacgcaaataatcacgtgcagccttgtttcccatggatgtgcgctggatctgcaatgcgatccggcgaaattccgattggggcaacagatagacacatcgctcctgaccacgggccatcaccatgcccggtcccagctggctgcgaaattttgcaggcaatgccatacgtcctttggcgtcgatttttggagtatatgttcccaacagcagcggaggcagtccagccatcacaccgctcgcttgcgtcgaaccatcgtcggagaagggctcggtttcaacgctttgaaccatcgccacacctccttacatgatgcgcgggaacacctagacccaaaactctttccccactttaccccacgcatcaccataaatccccacataaatggaaaaaatcagcaaatgctgaggttgatttttcccacattgaacgaatggcatcaaatcaactaccgtaaattcatccttgcttcgctatgtcgcactcgccctcgtcggttttcgtagaagcctcggggtacattggagtgcctaagttttgtgaggaagggattgcagatgtcgagttattccgcccagttgcgtgaagaacaacaggccgtcagccgcgcgtacggccgcttggatgatctgcgggcccaagctcgtgcccgtctcgacaccgtgcgtgctgccggctcgcacggatcgcccacgcaacgcaccgaacgcgattccttcgccaccatgtacgaggatcgcctcacccagctgcgtgccgtcgaagatcgcctggtgttcggcagactcgacgatgtccacggtgcgcacagatacatcgggcgtatcggactgtccaacgaaaaccacgagccgatcctcaccgattggcgagccgacgcggcacgtccgttctacgaagcgacgccttccaatcatggcgatatcgtaatgcgccgccatatcacactcagcttccgtgaagtggtcggcgttgaagacgaggtgctcgatgtgcactccgaccaggtcgggcaggcgtcttcggacggcactctgaccggcgaaggcgcgctgctcgcatcgttgaacgccaagcgcaccggcaagatgaccgatatcgtggcaaccatccaagccgagcaggatcgcattattcgcgccgacctcaaccaggccgtggtggtgcagggtggaccgggtaccggcaaaaccgccgtggcgctgcaccgtgcggcatatctgctctacacgcatcggcgaatgctcgaacgctccggtgtgctcgtggtcggaccgagctcaaccttcctgcattacatcgatcaggtgctcccctccctcggcgagaccggagtggtcagccgaaccatcgccgatctgatccccggcgtgatcgcgacggcgcatgacaacccgttcgccgcgaaattgaagggcgaacgtcgtatgtccaaagccatcgccaatgccgttgccgcacgagaacgcgtccccgcatcattgccgtcgatccgcatcaacggattcgcagtgcccatcgtgcgcgcggatatcgaacaggccatcaccgatgccaagcgcacgcgacagcagcacaacaaagcacgcgaaactttcgtgcatagcatgttgatcgccatgcgcaaccgttatgtggacaagcttgattacgagccggagcaggcggagttgacggatgtgatgcagcagttgcgcatgaatgacaccttgcgcaagacgttgaatctcgcatggttgccgatgaccggcgaatggcttatcgaccaactgttctgcaagccgcagcagcttcgtcgcttcgcaccatggcttgaggaacgcgatatcgaagcattggttcgccccaaagggtcgccgtttaccgtcagcgatattccgctgctggatgaagccatggaactgcttggccccgaccccaaagcggtcgcccgccaaaaggcgttggacgccaagcgcgccgaggaggagcagttcgcgcaagatacgctggctcaggctggcatcggctccggcatcgtcacttcgcagatgttggtcgacaatatcaacgggatggacgcggaactcaccgcgcagcgcgccgccgcagaccgtgaatggacatatgggcatatcgttgtcgatgaagctcaggaactcaccgccatggattggcgcatgctcatccgccgttgcccgtcgcgttcgttcaccattgtgggcgatgttgcgcaaacctccgcattgggcggcacccgttcgtggcggcgtatgatggatccgttgttcggaccccacaattggcaactcaacgaattgacgattaattaccgcaatccgaaggaagtgtcgcagctcgcctgtgatttcgcggcaacggagggattgtacatctccaccgtcaatgcggtgcgtggcgtgccggattcggtcaagcgcctcactctggccgacgacagtctgattgccgatgccgtggcacagcagaccgtcgatctggtccgcgcattcgtctcctccgatggcaccggacgcgtggccatcatcgcacctgacgatatggtcaagccgttgcgcaggcgggtgtacgaacagcttcgcgaaacattgacggcgaaggagttcgaccgtctcgatgcgcagagctcttgggatgaacaggtcaccgtttgttccacgcaaatggtgaaaggcttggaatacgacgcagtgatggtggtgcagccgggaagcatcgaggagaatgccccctcacgcattgtggccgcagccgatttatacgtcgccatgaccagaccgacacaacgtctgcttatagtccggacaaatgcagacgaaaaactgctcaagctataaggtaggaaccatgcctaaagcattgttacttgaaaatattcatcctgacgcggcacagtcactgcgtgaccacggcttcgaagtcgagtgcctcaggggcgccctcaacgaagatgaactcatcgacgccttggaagacgttgatctgctgggcattcgctccaaaaccagcgtgaccagcaaagtcatcgacgcacgtccgacgctcacggccgtcggctgcttctgcatcggcaccaatcaggtcgatctcgactatgcgggcaagcacggcgtcgccgtgttcaatgccccatattccaacactcgctccgtggtggaactggttatcggcgacatcatttgcctgatgcgccgcattcctgcgcacacccatcatatgaagcacggtatgtgggacaagtctgcttccggctctcatgaagtgcgaggcaagacgctcggcatcatcggctacggcaatatcggatctcagctttccgtcatcgccgaggcacttggcatgcgcgtggtgttctacgacattgaagagaagcttgccatgggcaatgcccatcgttgctccacgctgaacgaactgctcgaacagtccgatgtggtcacactgcatgtcgatggccgcaagtccaataccggtttcttcggtgaggaccagttcgcgcatatgaagcaggattcgatcttcatcaatctttcccgcggttttgtggctgatttggacgctctgaagaagcatttggactccggccacatttcgggcgccgcagtggatgtgttccctgtcgagccgaagaagagcggcgacgagtttttgacgagccttgcggatgaagacaatatgattctgaccccgcatattggcgggtctacgcttgaagcccagaagtccatcggacagttcgtctcacagcgtcttgaggattattggttcaggggatccaccatgttgtccgtgaatcttccgcagatcacactgtctgatattcgttcgaacttccgcatcgcgcatcttcacgcgaatttgcctggcgtacttgccaaggtgaaccgtgtgctcggagaagagaatatcaacatcgcggcacaggcactgggcaccgaaggcgaaatcggctatgtggtcaccgatgtggcccagcgccccagccagaaggctttggacgaactcgcagccatcgaaggcacgatccgtatgcgtgtgatcagctgacgatcccaatccggcaaacgccactacgatacgaatgcattgtgggggttccaatcacttattggctggaacccccacaatgcatgaaccctaatgccgtttgccgtaatcgcccagttttgcgctaccaagtccatttcagccaaaacaaacgcattatcatatgcgttcgcaaccgttcgaacctacttcagcgcatcggccttcagctcgtcgatcgcgttctggaaatcctcaagattctcaaaattctggtatacactggcgaatcgcatatacgcgacctcatcaagatcacgcaacggtttcaaaatggccctgccgacctcgtcggatttgacttgagccagtcctcgggcacgaagatcctcttcgacctgctggccaagagccttcaaatcgtcttccttgatcggacggccctggcatgccttgcgaacaccagaaatcaccttgttcctatcgaactgctcaacgttgccggaacgcttcaccaccaacaacatagtggtctctagcgtggtgaaacgcttagagcatttcgggcattcacgcctacggcggatggaatggccgtcatcgctgatgcgggtatcgaccaccttggtatctggattctgacaaaaagggcaatgcatggtgtcaagaatagcctgaaccattgaactaggccaatcttgcgcgggttcatacctcgtcgggaacgataagtctttgaccggcccgaagcgatactgaatccagattattcagtcgtaccagctcgtccacagtatccgcaacattgccaccatcaggcgtaatacgcgcagcgtacccccacaacgtatcgcccggctggacggtatataccaccaccggcgtcgctccgggatctgactgcgcgcgtgcaggcatcatcaatccagccaaacaccatgcgagcaccatcagcatcatgattacggccagtcgatccgcccagactttgaaatcaacgccatgagccttcggcacacgatccatcacgccactccttctcgaacagctgttctatcgaacgcatgttctgagtatggcacaaatgttcgataattgcagacacacctcgaacagatgtttgattttctcggcgtttcgcgttatgcttgcctaagacctgaaaggagcccaccgtgagcaccgtcccattcacgcccaaaaaggatgccgagcgtccggatgaaagcacgctgaccgaccgtcagcgcaaggtgcttggcgccatcaaaaaacatctcgtcgagcaggggttcgctccctcattccgcgaaatcggcgaagccgcagggcttaaaagtccgtcatccgtcaaacaccagttgcaagtgcttgacgacaagggcttcattcgcatgaacgcgaacaagggcagagccatcgaagtcgtgagtttcgacgatgacgaggtttcgcccggcaaagtagcgcaggtcatcccattcccgagccaatctgattccagcggatccatcatggcttcccgcgatgtccccttggtgggacgcatcgcggcaggcgtgcccatcaccgccgagcagcatgtggacgatgtgatgcgtctgccggaacgtctcactggcaccggcaatctgtttatgcttgaagtacatggcgactccatgattgacgcggctatctgcgatggtgattttgtggtggtacgcgagcagaacaccgcggaaaatggagatattgtggcggcgctgctcgacgatgaagccacggtgaaaacgttccgcaaggatcatggccatgtctggctcattccgcacaatcccgcctactcccctatcgatggcacgcatgctgagatcatgggcaaggtggtcaccgtgctccgcaaaatctgacgttagactattcaacgccattgaaatcgcgtccacaaagatgaagccataaacaaagactccatctttgtgggcgcgattcttttccggtaaacgcaccggtcatttaagaatgtttaggaatgcatttcggatttgctggtcgaactgtatccttccggttcgagttggaaggtggtatgaggtacggatacggggaaatgttcgcgcaggcaatcttgtagttgtgcgagtatttccgccgcttctttcatggtgagtccttgttcgaccacaacatgcgccatgaagatcggcatgcctgtggatacgatgctcgcgtggatgtcgtgtaccgccacaacatgcggcacttgttccaagtgggaacgcacttcatcgagatcaagaccgttgggggtttcttcgagaagcacgcgaaccgcgttgcgcaacagtttgatggctcgcgggattatcatgagtgcgatgatgccacctgccacagcgtcgaatccggcccagccggtgcagatgagcacgcttgccgatacgattacggcaacggaccctaaagcgtcattcatgacttcaaggaatgccgctttcatgttcatgttgtcttcgctttgcgatgcgaggataaagattgatccgatattggccgcgaggccgagtatgcccatgaagagcagcaatcgcacgtcgtttacttcgtcggcagatccgccgaaaagtctcatgccggcttccacaagcgcatagatacctacgatgaggaggatgagggctccgactgccgctgttagcacttcgagccttgcccagccccaggtgcgtttgttgctgggcttgcgttgcatcagtattgcggtgacggttgatgcgatgagtacggacatgtcggtgagcatgtgtccggcatcaacgagcagcgccaacgattctgtgatgaccgcgctgatgacttccgctatgaataccgtcgaggtgagaccgagcgacatcatgagccgtttttgatgttccgctcctgtgttcgctatcgatccgtgcgcgtggtcatgtgccatatgcttaatctttcagcccgattaagaaacttattgaaattgtttctcaataccattttcattgctctcaaaacgcaagaaaccccagccataggccggggtttcctttatttctttttgcagtctaacgactgatcaatcgcctgtcaatacccaagcaaccaaaaagcggtaacgcagctggcactccgttaccgcgttttttatcagaagccgaactgggcagcggtttccttcagcgtctctgcggaacgcgtaagggctgcaagctcgcggtcggacaccggggtgttgatggcggtgttgacgccggaacggttgaggagggtcggcacggacatgcagacgtcggagatgccgtggaagtcgtgaagcatggagctcaccggcaggatgcggttggagtcgcgcatgacggcttcgatgatgtcaacgccggacatgccgatggcgtagttggttgcgcccttgccgttgatgatcttgtaggcggcgttcttgacgtcctggtgaatctgctcacgaacttcggcgtcgagcggagcgtgacccggcagcggggtccagtcgcacatcgggacgccaccgatggtggcggaggcccacagcggcacttcggagtcgccgtgttcgccagcaatgtaggcgtgcacattcttgacgttgacgccggtctgctgggcgatcaggaagcgcagacgtgcggagtcaaggttggtaccggagccgaagacctggtttgccggcaggccggagatcttctgggcaacatgggttgcgatatcaaccgggttggtgatgagcatgtagatggcgttcggagcgaccttcacgaggccaggaatgatggccttgagaatgttgatggtggcaccgaccagttcgagacgggactgacccggcttctgacgcggacctgcggtgatgacgatcatgtcggcgtcgcggcagatttccggatcatcggagcctgcgatggacacggtcgggaagaagctggagccgtgctgcatgtcgagcacttcggcttcgacgcgttccttggcaatgtcttcgagcacgatctcacgtgcgacgccacgctgagcggcagcgaaagcgagagtggagccgactgcaccggcaccgatgatagcgagctttgtgggcttgattggtgaatccaccatgtgcttacctctcttataagaaagaatgtcccgctggtagcaggttttctcttagaatttcatctttactttatccacacagcatgacgtttcaaggcgttataacacgacttgcaaataatgaaaagtgatatgcatcacaaaagatgtgagcgctcacaaacgctgtgtccgttgcgttgcactgttttgcaaggttttcagccgattgactgttccacgatttgcgcagccaaatgatcgtccacttccgcttcgagcatcataccgtcgtcacggtattcgacgttgatcactttgccgtattcacgtacgcgcgacaccagcgaaccggcagtgtatggcagcaacgcctcgacatgcacgttcggcgtcggcagcatggattccacctgtatacgcagcttgtcgacgccttcgccggaaaacgccgatacgatgtacgcttccggcatcaacgcctcgatacgctcgcgtgtggcctcatccatacggtcggccttgttgaacacgataatcgtgggaatggtttcgacgccgtcgatgtcggaaagcacatcgtcgaccgcgtcgatttgcgagaacgggtccggatgcgagccgtccaccacatgcacgatcagatcggcttcggaaacctcctccagcgtggatttgaacgcttcaatcagctgcgtaggcagtcgacgcacgaacccgacggtatcgacgtacgcatattgacgtccatctttggcacgcgccctgcgcactgcggtgtccaatgtggcgaatagcgcgttctccaccaattccgctgatccggtcaaccgattcgtcaacgacgatttgcccgcgttcgtatatccaaccacggcaacggtcggcaatccgaaacgacggcgagcgccacgtttgacgtcacgcgcgggagccatctgttcgatctgtttgcggagtttggcgatgcggcttcggatcacacggcggtccatttcgattttcgtttcgccaggtcctcgcgagccgatgcccgcgtctcctgcggcgcggccacctgcctgtcgcgacagtgatccgccccagcctcgcagtcgtggcagcatgtactggagttgtgccagttccacttgggctttgccttcacgtgaggtcgcatgttgggcgaaaatgtcgaggatcacggcagtgcgatccacgaccttcactttggtggcgtcttccaaggcgcggcgttggcttggcggcaggtcatcgtccacaacgatggtgtcggcttcctcttgcgccacgattccggcgagttcgcgggctttaccggagccaacgtatgtagctgcgtccggcttgatacgatgctgcagcaggccgtcgcataccacggcgccggcggtttcggcaagcgcggcaagttctctcaatgattcttcggcctgtgcctgtgtggtttcacggctggaccacacgccgacgagcacaacgcgttcgaggcggacttttcggtattcgacttcggtgacgtcttgcatttcgccgagtccggacacatgcttcaacgcattgcgggattcgcgttcctgccattgttcgtcatgggattcgttgaaatggttctcgccgttggtatcaagcagcacttcggactggtcggcgagcacgcctgacacgtcgttggcgctcatgctatgctcgatgtcgttttcttggctcaatggcacctctcacggttaaattatggtgtctttattattatcattctctagagacatgggtatcgggcattcgccacgtggatgagcgtggcttgcgtgatgccggaggcgagcgtttgcaaggagtgggtatggcacaggccgaacagtatttcgcggctgatccgcagtcgaaggatgtacgtaagaggctgcatgttgtgttgcgaggcaatgaggccgatgttgaggtttccaatggcgtgttttccggcaatcgcgtggatttgggaacgtccgtgctgcttcgtcaggctccggagcctcctgaggagggtacgttccttgatctgggttgcggttggggtccgattgcgttggcacttggctttgcttcgccgaaggctgatatttgggcgttggacgtgaatgaacgcgcgttggatctgacgcgtcgcaatgccgagctcaatggtgtgaggaacgttcatgcggtcaccgccgatgagatcccttcggatatgacgtttgatctgatttggtcgaatccgccgattcgtgttggcaaggatgtgctgcatgagttgttgatgacgtggctgccacgtttgaatgcgggtggtaccgcctatttggtggtgcagaagaatttggggtcggattcgttgattccgtggcttgccacgcagcttggcggcgatggttatgaggtaagtaagtacgcgagttcgaagggcttccgcgttatcgaggttatgaaggcatgaaattcgaatatccttcccaactgccggtttccgctgcacgtagcgatattgccgaggcggtgaagtcgagccaagtcgtgattgtgtctggtcagacgggttccggtaagaccacgcagctgccgaagattctgttggaattgggccgtggatcgcatggcaggcagattgtgcacacgcagccgcgtaggctggccgctcgtaccgtggccgaacgtatcgccgcggagatgggcgtgcgtttgggcgacgaggttggctatcaggtgcgtttcaccgatgagagctcaccgaagacccgtctccgcgtggtgaccgacggtattctgttggcgcagattcaacgcgatccgaaactgatgcaatacgatacgatcgttatcgacgaggcgcacgaacgtagtctcaatattgactttctgctcggttatttgactgcgctattgccgaaacgacgtgacctgaaattggtaatcacgtcggcgacgattgattcggtgaagttccaggagcatttcgagcacgctttgcatacgaaagtgccggttatcgaggtttcgggacgaacctaccccgtgcaggtcgtgtatgagccgctgggcaccgctccggcgttgatgcgttccgtacccggttttgaaacgggcgcgatgccgggcgatgccgactatgaaacgttgtcggccgctcccgacgcgaaggattcccatgagccgaacgttgacatgccgacggcggtggcgcgcgcctgtgccgagttggtgattcattcgagtcatgaccgtggcccgcgcgatattctcgtgttcgcttcgggcgagcgcgacattcatgattttgagaatgcgctgcgccatcattatggtccgcgtgccattgatatgcgtcgtcctgatgcgattgagatcgtgccgttgttcgcgcggttgtcctccaaggagcagcatcgcgtgtttgagccgcatgaccatcagcgtattgtgatcgctacgaatgtggccgaaacgtcgttgacggtgccgggcattcgttatgtggtcgaccctggcaccgctcgtatttcacgttattcgaagagcgcgaaagtgcaacggcttccgattgaaccgatcagtcaggcgagcgcgaaccaacgttcgggtcgttgcggccgtattgcagatggtattgcgattcgcttgtattctcgcgaggatttcgagacgcgcccggaattcacggagcctgagattctgcgcacgtcgttgggtgcggtcgtattgcatatgctgtcggtgggtgtggctcgtaccgcgcaggatgttacggatttcggctttatcgatccgcctgatatgaaggcggtgtctgatggtttcaatgagttgaccgagttgaaggccgtggcgcgcaagcatggcgaggttgtgctgacgcatacaggtcgcatgcttgcacgcattccgatcgacgtgcgtttgggccgtatgatcatcgaggctgcgaagtcgaccacgccgaacacgttggccgcagtgctggtggtggtcgcgttcctaagtttgcaggatccccgcgaacgtccggatgagaatcgtgaggaggccgaccgcattcataaccggtatgccgatccgtccagtgattttctgaccgcgttgaacttgtgggatcgcgtgttccaagctgatggcgagccgagcaattccgcgcttcgtaggatttgcaagactgagtatttgagttggctgcgcatccgtcagtggaaggatctggtcacgcagttgcgtgagatgtgcaaggaattcaagttcaaggttggcgatccgattccggcttcgcgtccgccgcttgagattcgtcagcttccgtcgaatcagcaggctgcgcattcgttgtgttgttcgtgggatgcgcagggtattcatacgtcgatgctttcgggcttgttgtcgatgatgggcatgcagatcgtgcgtgaaccgaaggcatctgatttcgctggcttgaagggcgctgcccgtgcgcgtgccatgaagcgtgcgcagaagatggcgaagaatgattatcagggtgcgcgtggcacgcatttcgcattgttcccggcttccgcggtcgccaagtcgacaccgcaatgggtgatgagcacggagttggtggaaacgagccgcttgtgggcgcgatattccgcccagatcgatcctgcttgggctgaaccgttggcgggttcgttgacgcgaaccacgtatgcggatccgcattggtctggttcgcgtggctccgcggtggcgagcgcgaaggtactgttgtatggtttgccgatagtgcaggatcgtacggtgcagtggggtcgtatcaatccgctggaggcccgtgattttctgattcgtcagggtttggtcgagggcgatattcagcagcggttctcgtatgacgatttcattgcgaagaatcgcgatgtgctggaggacgccgccgacgatgcgagtcgcacacgtcagatggcgcaggcggtcagtgatgaggatctgttcgatttttataattcagtgattcccaatactgtcacgtcggttgcggatcttgcgaaatggtggaagtcaaagcatgatgagcagccggatttgttggattttgatccggagaaggtggagcgtcttgctgatgccgagtcagtgtcgttggctgattatccggatcattggcatacgttgggtacggacggctcccctatcgatttgcggttgagttatgtgtatgatccgcatgatccaaacgatggcgtgaccgtgcatgtgccgttgaaggtgttgtctcgtttgacaccggaacagttcacgtggaatgttcccggattgctggatgagttgattgtcggcatgatcaagtcgttgccgaagacgttgcgcgtgcagtttgttcccgctcctgatacggctcataagattcgtgcgtggattgatgagaggtatccggatctgcctggttccggtaaccagcagaagccgaatcttgctcctaccaatgcggagggtgtggccgcgtggccggatttgcctcatacgttcacgcaggcggcaatcagcatcgttggcgcgcagattcaccctgaagtgttgactggtgaattgtggagcaagctcacgccgtatttgcgcgtgacgttctctgtggagcagcagttgcctccgagtcgcaagagtcagcatggcaggcgtcatgcgcggggccctgtcaaggtgcttggctcgggcaaatcgttggtggagttgcagcgcaagtttgcggagcaagccgaggcttccgcacggcagatggtaaagaagcaggcggaaaacgctggaaatcagggcaagcttgtggagcaggccaatctgctgcataaggctggtgccactaccgaagctcgttccaccatgctgtggcgcggtgcacttgatgttttgcgtatgccgagcgagcgtatttcgtcgcgttggttgggtgcggaggcgttgatgttggcgtccgcaccatatcagtccacgaaggatcttactgaggatctgcagttggctgcggtgaagcgtttgctgccgaatgttgacgaattgccggatgatgaggcgttggcgaatgcggtgcttgatgtgcgtgaagtgttcgaagataccgtgtatgcggttgcgcatgatgtgatcgctattttgaagcggtatgcggaggttgataaagccgtgtcaggcaaggccgatctgccgatgttgagcgttttgcagtcgattcgtgagcatatcgccacgctggtgtatccgggattcatcggcaagactcccccggatgcgttggcgtcgattgaacggtatctgcatgctgacgtgcttcgtttaggtaaggcgaagaacgacaagaatcgtgatgtgcgttgggcttgggaggctgatgaggccaagcagttggccgacaaggccatggcgaaggccgaacgtgagcctgcaggtccgcgtcatgaggcgttgatgaagcaggcggtcaccgcacgttggatgcttgaggaattctacgtatcattgtgggcgcaggaactcggcacgccgaagccgatcagcctgcagcgcatcaagaaagcgttgagctaacgcatcatcatctttcgcattccattgccgtcgatactggcggttttccagtatcgacggcaatgggacctaatgaaatcatcctcagccgaaccatggttagcacactctagcgttgcttgaagaaacggaacaactgcgtttcacgtatcgtcataccgacgagcacgcttgataccatcactccagcgagtatcgcacatggcgcgcgcatcgcacccaaccatacggtcattgaatcggcgatgctcatgcgaacgcaatacgcgcccaacagcgcggccgaagaggcacacgccaaaccgctccaaatcaacgtttccacagcgatttccagcaattgcgcacctttggactgccctgaatgcaatgcgccagcatattccaatctacgacgacgcacgccgaacgcgccgagcaccagccccacaaccaatcccagccacggcatccaacgagtcatacgctgcccgtacgaagcctgcgcatcgtaatgcgaatcgaaactcttattcacctgcgtcacgccagcattggatgacgaacccgacgcaaccagcgtggaaaacaacacatcctccgtctgcccgctttgcggccactgtctgacccaacattcgtcgaacgtgccattcgacgcggatataggcacaaggagagcgtaggcgaatcgcgtgtcacgaccatcgttcggccaatcaaacacgcctgcgacgctcatcgttccctgttcggtctgcattacactgcctttggtgagaccaaaatccttggccacgtcggtagatacccacacgccggacacatcggttttcgtgttcctggcgatcatcctgatcatgcctggcgtcacttcatacgacgatatatccttgccgggcgtggcaagcggcacaatctgttgaccggcacgcatcgcaccggccaaggtgcccatcacaccgccgccagcgtcggcgagcctgtcacatgcggctccgtccaccgttcccccaacgatggcgccaacgtcggcataggcgttgatgcgttgtagcacctcggtttcgagccccaccacattggcggcctcatatccgccgagcaatgtagacgcgaacaataccgctgcaaacataagcagcgcatgactcactcccgcgccaatattgcgcaacgcttcggaaagcaccgatcgtaatcgcataatcgcctactcgcaggtgagattgttaagtccgctgccgatttccacattggagatcgaagcgatgtctccgctgtcggcttgcacgaggctcacgccaagttcgcctcccacgatcgacactttcacgggagtgttgccatgattgttggatgtgggcacgatgcagccggttgaaccgttgatgccgaataccgcaccggctggaacgcgcagcactcgcatccgttcgctcaaggccagagtggcgtccaatcccgcttttttggattccacgtccacggattggtagctgtcgttcgcttcgacttgttgcaggaacccggcatccgtgatttcagtagtattggctggcaatgttcccgtaatgccgaatatcgtcaacgtgcggtcctgcgcggatgcggtgccgtttttgatggtgagtttcgtcaaggatccggggattttgccgattgcggtgccgcccgtcaccatggatccggcggttgcgctccactcgtcaacggcgacttcgtgttcgggaatccacaatgtgtcggccaatgacaacgatccatccgacgtattgccgttgtcggccatcaactgcttccacccgtccgatgtggcccgccaataggtatccgatccgggaacgctgttgtagccaagtaagctgagttcattattcagggcgagcacatcgccgccgatgtctccggtcttcaaatcgcgatacaagggggttgcggtgttcaacgccactaccgtgcgatcgttcacctgataggcacctttgcctgaggtcaggccgttgccggaccagtccgcggtgaccaggccactcgcattgccgaaaagatcacggtcactggaaatggtgggcaccacggtaacttgttgcgtacccgcgtattcctgtacgctggcgggaaccacagtcctctcccccgccgaactgagcaatgtcggagtgcggtcaggcagccacaatgcgcaggatccgaccgcaatacaggctgccgtgacagccgccagcaaagtccaagtcacagcagtgcacttcgaacgcttccctcccgtcctttgcttcattccgaatcgtcgcgtcatactcacatataccccttcaatcacgaccaacaagcaccatcagcgaatacatcaccatgattcccctggaatcacttaccttctcaccacaactgttccgtatcgtcggtcgcatatcccacgttgtagccgttcgacacaaggcaactgcgcacttgcaggttctgcatgtcaaacgaagtgttgccatccgttccggaaaactccttgttgaaccggcttacggtatagtccttcggcacgagcgagtctctatgcaaacaatcgaccacggcttgcgcttgatcggcatacagattcggattgcctacgataatgccgtacacatcctgcgcatctgcaacatactcatcgccgcattccgtggaatcatcggaatatcgggattcctgaatggtcgttccctgtttgtgtccagcttcggcatagagtccgctcggatatttgatgagtttgatttccttatatcctttgtcgatcatgcattgccggtaatcggaccaggctttctcataatccgacgttgaaatctcacccgtactcttggctttgtccaatatcgttttctgcgattcagcgatattaccttgcgattcccgctgttcaatccattcactcaaagacgccgccaatttctgtccgcccgccgacccattttcggatgatgattccgatgtggcagaatcagaagatgcgcctgtggcatccccattaattgagcatcccgccaaaagcattgacaatgcgacggcaagaacgcaagtcttgcaaaatgacatccaagaagtcaccatcttcacccccgtactaatgtgtcacaacgagtgtagcaccgcatgataatgtgcatagcaggcggcatttccgaaaaacttacttgcatatacgcaaatgaggtagggtggatgttgcgtggctgcaattaggggactacaaatgattggcaagggtgcgtcggtaaagtgattgcctcgtgaaaggttggctatgcgcgttgcggttgaggggttggctcatcgatttgagggaaccgatctgctgttcgagaatttgagtttcgtggccgaacctggtgtgaccattgcgatatgcggtccgtcgggatgcggcaagtcaacattgctgtcgattcttgcaggatgggagcagccttacgctggcacggtgacgagagaaggtgtggatcgtgttggatgggcgtttcagaatccgtatggtgttgcggaacgcacggcgctcgaccatgtggtgtttccactgctcgccaagggaatgagccgccgcgaagcggaaccaaaggctttggaagcgatggaactgttcgatctggcgtatgcggcggacaggcgtttctgcgatttgtctggaggcgaggcgcagcgtcttatgctcgcgcgtgcggtatgttccaggccgaacatgctgctggttgatgagccgaccgcccagttggatacgcgtacatcacattccgtaagccatgtgctcggcaatctggccggtcaaggcatgatcgtgctggtggcaacccatgatccggacacgcgggacgcctgcgatcgcgtaatcgatctagccgactacgctccgcaagtcggcggatctactgcccagtccgccaacatcgcagtccactaatcgctttccgcaatctcaacgaattacagataaaacttctataactttgccgctttcagaaaccgctcgttcaaacccgaccaaatgccatcagacttgctgtttggtgtagaaatcgcgttctcgagctacgaacgggcgcagcagtgttgtggtgccaaccgcacacagcaggaagatcgcgcccacagggccaagccacatcagtcccaaatgggcgttgaccagtccaccaaccgcggagccgaccgcgatgccgatgttgaacgacatggaattgagcgatgcggccagattcagcgatcccggatgcgactgagaggcaacatccatatatagcacctgcgaggcggaattctgcagatacatgaacatgccaagcaccaccagcagcaacgcaccatacaccggcacccaatgcgttacgatcagcgatgccatgagcacggcgtgcgcgcagtagatcggacgaatatgcgtcagtggttccactcccctgccacggtcggcaagcttgccgccatacaggttgctccacaggcaggccgcgccgaaaatcaccaggccgacgcttaaatactgttcgggaacatgcacttcgtctcgcatgatcggcgtcagatacgtatagaacacgtaagttgccgccgcgccaaacaccacggcaagcacgcccaactgaatacgacggtcgaaaaacaggcggaactgcggcagaaaaccaatcttcacaatacggctgttgcgcggcaacaccatcaccatgagcacaataagcaccactgtgagcacgttcaccaaatggaacgcccaacgccagccgaacgtgttcgcaacccacgtgccaaccggcacacccaccacggatgcgatggagaagccggaaaacacccatgcgatgaacttcgtgcggtactgttcagttgttacatcgggcgcgtacgtcatggcaatggccaccagcgtgccggacaccagcgcgatgagaattcgcgccaccacgagcacgccataattcgacgcgaacgcgcacagcacgttgccgataaggaacaccccaaccagcgtcagatgcgtggcaaaacgcggaaaacgagccgacagcgccgatccgagcggcgtgaccggcgcatacacgaacgcgaacagcgacacaagattgccgaccgtcacctccgacaccttcaagccagccgcgatatccggcagaacgccaacgacaatgaactcgctcatgcccagcatgaaactcagcgagatcagcacaatcacaggcagattgaaaaaccgttccttcgccacatcactcttcgccatacacttctcctccatagcccctcgaactccccacgcctcgccaaactcgcattgtcattaaagcttctcacgtcaatcgattgacgaatcaatcgtcaaacaaacgataagccaaacgcgatacaatgacgcgcgatgacacgcaaaacaaccaccacagcaaaaaacaaccgcaaacccaagaaaaacaagcagccaagcctcaccaaactccgtaacgcctggaaaaaagcaaacaccccaaaacgcatcctcatagtcggcgaaacactgatagccagtatcgtcacgctcgcgttgatcgttggattggtgcgattcgtcggttggcgtgtgcaagtggatgaagcggtcgcatcgcaggaacaattgcagacgcaatacgatttcaatccgggcaacatcatttcagatggtctgttcttcaacgggaacgcgttgagcgagcagcaggtgaacgccatcatcgaaaaacagggtgccgcatgcagcggcgagaaatgcttgaaatccatgacgtttagcaccgaatcgcaacccgccaacgaatactgcgaagcatatgagggagagccgaacgaaagcgccgcggcgatcatctacaagtcgggaaaggcgtgcgacatcagtcaaaaagtgctgctcaccgtgctgcaaaaggagcagcatctgcttaccgccaccgatccaagcgacttccaattcaagtcggccatgggattgagctgcccggacgacgcgaactgtgacccggaatatgcaggttttttcaaacaggtgtatggcgcggcgaaacgctaccagtattacgtgcaacatgaggatcgctatggataccatgcgggcacgctcaactatattcaatacaatccggacgccagctgcggtggcagcaacgtgtacatcgaaaacaaggcgacagcactgctgtacatttacacgccttatcagccgaatgcagccgcattggatgcgggagtcggcgaaggcgacgcctgttcgacttacggcaatcgtaatttcgcaatcatctacaattcgatgttcggctctcctcgaggctgatttttcgatacaattgctcatggaagggactgaccagaaggagcctttcatgggcctactcaacaacaacaactatatcgacccattcaagggttccgattacatcgatcccagcagcaacgccgaacgcctgtctaatcaggtgaaccgtgaccatgcacggcgtgaatcctatgtccagcggcgatatgtgaaacccgcgcagagcgatcaggcatcgcgcgacaggcaggccccacaaaacacccgatccaagcaagacggtagatctcaacaggcgcaaggcgatcagtccacacgaggagacacgctccaaaccatgttgaacgactggtccacgcaaaccatgcggtatgctcagtccatgcagcaaagcttgcaacaggcgttgcggcaaaatcagcaaaacccgcagaacccgcaaggacgcccatcgcagccctataatccgccgcgcatacaaacggaacgagccacacgcgagttccaatccacttccgacaagaagcaacgccgccataaaaacggcttcgtcaccgttttggagatcgttatcatcatcgctgtaatagcgtcgattggcggaatgctttctgacagcatgtcaaacatcatctccgatttcgatggatccacaagccagttcgaggagctgtccacacaggaaaccgtcagcgaagacgttggaaagctctactccaccggaggaaaagcattggaagtgaacatcgaaggcgtgcagacaggtccggaggatttgaacggcgacgccacgctcacggttttgctcacctgcacgaacatcggcaagaaaacgatgtatcctcatgccgtcgcagatctgatggtcatgcaaaacggcatcgagcttgcccctgcattcacttccaacgaggattccgaccgcacggagttctccggcgccgaaatgaaaccgaagaaaagctcgcagaccaccagcagtttcgttcttacggacaccaattcaccagttgtggttcagctgatgaattattcgcagcataatgttgttcgcgccgcgttttcctttgacgaagtcgacatagaagggtccttgaaacatattgattatgcggccgtccctcagcccgagcaagtggacgcttcgaatttcgacgaagacggatccgtaaccgattatgacgaaagcaccctgcatttccgcgtagactccattgagaagacaagcccctcatatgccgatcatgacatagcgttcgcacgcatatcctggtatgtcgaaaatggaagcaaataccgggctttcctgaactatatggatgtttccgcgacccaagacggcactgagttgcatagcacgtatcttgacgatgatagctattccacaacacgcaaggtcactcccggcgtgaaaatgacgacgacagtcgcttttgaaacgcaaagcaactcgcctgtgacattcatattttctgactatggtgatgagattcttcgcaaaaccgttaatttacggtcaattgagtcattggacctttaatccaatacttgcagaaacatcaaaagaagattcaaataatcattcggaaagcaaaagaccgttgttgcaatcagttttctcatgattgcaacaacggtctttaatgaaacgattgcggttcgcttacagcttcggcaggtacttcttcagttcgaaaggagtgacctgcttgcggtattcctcccattcctgacgcttgttgcgcaggaagtattcgaaggcatgctcgccgagcactccggccacgaagtcggacttctccataaccttcaacgcctcgtcaagagactccggcaatggctggatgcccatggcctgacgttccgcatcggtaagctcccacacgtcgtcgctggtcggctcgcccaactgcatctgcttgtcgatgccgtcaaggcctgctgccaagagcaccgaatatgcgaggtatgggttggcgaccgggtcgagcgcacggaattccatgcgggcggaattgcccttgcctggcttgtactgcggaatgcgcagcagcgcggaacggttgttgtggccccagcagatgtagctcggagcctcgttgccgccccacaggcgcttgtaggagttgacgtactggtcagtgaccgcgcagatttcagccgcgtggtacagaatgccggccgcgaactggcgtgcggtgacggacatgttgaattcctggcccgcctcgtagaacgcgttggcgtcgccttcgaacaggctcaagtgggtatgcatgccggaacctggagcgtcggaaagcggcttcggcatgaagctggcgtgaatgccgcgctccagcgaaatctctttgacgacggtacggaaggtcatgatgttgtcggccgtggtgagcgcgtccgcataacgcagatcgatctcgttctggcctggacccgcctcatgatgcgagtattccaccgaaatgcccatctgttcgagcatgttgacggtggcgcggcggaagtccatgcctgggctgcgcggcacatggtcgaaatagccgccctcatcgattggggttggcgtctgggaccaatcatcctgtctttcgaacagatagaattcgatttccggatgcacgtagaaggtgaagcctttttccttggctttcgacagagcctgcttcagcacatgacgcggatcgcccaacgacggctcgccatcaggggtaagcacgtcgcagaacatgcgcgcggtgccttgcgggcctccacgccacggcagaatctggaatgtcgacgggtcgggcttgacgatcatatcgtcttcggacacacgggtgaggccttccactgcggaaccgtcgaatccgagcccttcctcgaacgcagcttccaattcagccggtgcgatagccacggacttcagcgttcccaacacatccgtgaaccacaaacgaatgaagcgcacgtcgcgttcttcgactgtgcgcaaagcaaactcttgctgtttatccatagtgccccatcgttccatgcgcatgttacgaaagtcgttaacacgcgccgaatatgacgagaccgtccacgttgtggacggccgtatcgtcatgggtttgcgaacaatgctcaacgtgcgacttcaagcgcctcttccaaagtgaaggcgcgcgcatacagcgatttgccgagaatcgcggaatccacgcccagatcggcaagttccttgatggcgcgcaggtcatcgagcttggaaatgccaccggacgcggtgaccttcgcatcagtgcgttccgcaacctcacgcagcagatcgatgttcggaccgctcatcatgccgtcgcgagccacgtcggtgaccacgtaacgagagcagccaacggaatccaggaacgccatggtttcgaacagatcgccgccttccttcacccatccgcgggctgcgagggtgtggccgcgcacgtcaaggccaacggccacgcgatcgccgtacttcttgatgacggaagcggtccaatccggattctcaagcgctgccgtgccaatgttcacacgggcggcgcctgcttccaaagctgcgtcgagggatgcgtcgtcgcgcacgccaccggacatttcgatattgaccttgtcgccaagctccttgacgatggcgcgcagctggtcacggttgttgcccgtgccgaatgccgcgtcaaggtcgaccagatgaatccattccgcaccggactcgacccacgtgcgggcagcctccagcggcgaaccgtaatcggtttccgaaccggattcgccttggcgcaagcgaacggccttgccatcacgaacatcgactgcgggaagcaatgtcaaagacatgtctgtacctctctgtgatcaaccgaccgccactaaacggcaatcgcaaataaatgtaccaagtggtcgttttaaaagcgtatatgtcaaagcatcgtcgaaacaatcatcggcgatctcgcaccatcagaacgtcgcaatccaattgcgcagcagctgcgagcccgcttcggcggatttttcagggtggaactgcgtagcgaacagcggaccacgctcgtaggccgccacgaaacggctacgtccgtacgtgcaccaggtcacgcgctcctcggcgtcatcgaaatcaagctggtcgccggacgtgtcggcgggagcggcactcatcgcggcgaaggaatgtacgaaatagaaacgttcaccttccacacccttcatgagcacggaaccttccggcgcctcgacggtgtcccatcccatgtgaggcaccacatcggcgtcaagcagttccacgtcgcccttgatcaggccaaggcccggagtgccggtgccgtgttccataccgcgttcgaacatgatctgctcgcccacgcacacgccgagcaccggtcgcccggcacgcagacgatccttgatcacggtgtctccgcccaccgacttgagtccttccatgcatgcgccgaaagcgcccacgccgggcactaccagaccgttggcttccaaggcctgccgatggtcggaagtgagggtcacgtcaaggtcgagatcagccagtgcacgaaccatggaacgcacgttgccgaaaccataatcgaaaaccaccacggaagtcatgggcgttctccttcttgtgtcattcgttgttctgtgacgcgagtcgtcttgtgtcgcataacgcatgttcggcaggatgactcgcgtttaccgtcgttaactgatgcttgatgtgccgcgtccgaaccgcgtatgctcggcgataatgctcatcgccgcatcccgatcaaggtcagcggaatcgaaaatggtcatatccgcctgttccagcgcgttcatatcggtgatgcccagcatgagatcctcaacgaacggcgcggtggaggtgaatagcaccggcggagcgaaggttttgcccgctctgccttccacgtacatcgtcgcttcgagcttgtccgcacggttgacggcaagaatcgcgggcatgccggcaacgacgatcgtcatgtctttgaccgccgcttccggaccgtctccgtcgagattgcgcagcaccgcgacagcaccttgcgccgatccgatgcattgcgcggaaatgtcggacaattcacagaatgccgacagcaatcgtggcgaggtcagtctggtgatgatcaccgccactttcgcgcgattgccaagcagtccctgcagctcgtcttcgaatttcaacgaatcctcagccgcgttgagcatgtcgtcgacttccgaggattcggaggattcggaggattccgcgttatcggaagcttcggaggaatcgaaagcttcagatggcggattgtccgcccgctcatgcttggacgcttcggcatccttgaattcctgctcgaagccggccatggccgcttccagttcctcttcgctgaaatgcatgccgtcggcgttgaggtcaccgaaatcgtttgatccatcgaatccttggaaatcgtcgaaatcgttatttcgatcgtcgctcatcacagagcgcccttcgtgctcggaataccgtcgacacgcggatccgactcgatggcgaaacgaagcgcacgtgccaaggccttgaactcggcttcggcgatgtggtgcggatcacggccggagatcacctgcagatgcaggcagattccggcatgcatggcgatggattccataacgtgacgcacgagggagccggtgaaatggccgccgatcatgcagtattcgaagccttccggctcgccggtgcacacgcagtacggacgcccggaaatatcgaccacggccttggcaagcgcctcgtccaacggcacggtcgcatcagcgaagcgacggatgccgcgcttgttccccagcgcctgcttcaacgcctcaccgaacacgatggcgatgtcttcgacggtatggtgcgcgtcgatgtcggtgtcacccgtggccttgatggtcaggtcaatcagcgaatgcttgccgagcgccgtcatcatatggttgtagaacggcaccgacgtgtcgatgtcagttttgccggtgccgtcgagattcaggctcagttcgaccttggattcgctggtttcacgaacgatggttgcggtacgcgccatgttgcgactccttttggaaaatgttcggtcctgttgtgttggttcagtcccgtatgtgctcagtcttgttccacaatacgcaacacttcgaccaaggcttcacggaaacgcgccatttcctcgtcggtgcccatgcatacgcgcatccagccgtcagggccgacggtgcggatgagcacaccacgcttgagcagttcgtcgaagatgcggtcgcgatcgtcgaaatgaccgccgaacagaatgaagttggactgcgtctcggccacttcgagcggctggcccttgtaggtttgttccttgagccatgccgcggtctgattgcgggtgtcacgcaggtgcgccacacggctgagctgttcgtcggtatgttcgaacgcggcaagcgcggctgcctgggtgacggccgacaggtggtacggcatacgcacgatgcgcacacagtcgataatgcccttgttggcggccagatagccgactcgcgcgcctgcgaaggcgaacgccttgctcatggttcggctcacggcgagattctcatactcgccgatgagttcgagcgcggtgggcgtacccggatcacggaattcgatgtaggcttcgtccaccacgaccaccggatgcacgccttcggcggcaccggccacttcagcggtttcggcggcgccgagcacgcgcttgagatcacccatcttcagcggtgtgccggtcggattgttcgggctggtgagcacgatcatggccggcttgacgtcttcgatggccttgatggtggcgtcgacgttcagcgagaaatcctcgttgcggtgcgcaagcttccatgtggtgaacgtgtcgcgggcgtattccggatacatcgaatacgtcggatcgcagccgagcgcaatgcgtcctggaccgccgaaagcttggaacagctgcagcatgatctcgttggatccgttggcaccccacaactggtcgacttccagcttgacgccggactcgcgttcgagatagtcgcagaatgcctgacgcaacgcgatatgctcacgatccgggtaacggttgagcgtcagagcgatttccttgactcgctgcgcgatggtttcgaccaccgccggttccggcgcatacggattctcgttgacgttgaggcataccggcacgtccaattgcggcgcaccgtacggctcctcaccgatcagatcgttgcgcagcggaagatatgccggaatggcgttgctggaagtctcactcatcgaaggcctgcctgctcttcctgttccttgatggtttccttgttgtacggatcgtcgatgaaacggctcagcacgctttcaccgtgtgccggcagatcttcggaaacggcgaaggcgttcacacgagcagcgagggtcttcaatccctgctcgtcgtattcgatgacttcgaccggcttcatgaaggtgtgcacgcccagaccggaggcgaagcgtgcagtgccggaagtcggcagcacgtggttggagccggacatgtagtcgcccagcggcaccggagagtacgggccacggaagatggcaccggcgttgcgaatcttggcgatcacggcatccgggtcggcggtctggacctcaaggtgttcggcggcatacgcattggccgcgtcaatggactgctcgatgccatcggtgaggatgatgccggactggcgtccgcgtagcgacgtgttcacacgctcggagtgctcggtgcgcggcacacggtacttgaggttctcctgcacctgttcggcaatctcttcgctgtcggtgatgagcacggaaccggcgagttcgtcatgctcggcctgaccgatcagatcggcggccagccagctcgggttggcacccttgtctgcgatgatggcaatttcggtcggtcctgccacggcgtcgatgcctacaatgcccgacaccatgcgcttggcggtggcgacgaaaatgttgcccggaccggtgatcttgtcaaccggatcgcacaggatctcgccgtcctgcggttcggaacccttggcaccgtaggcgaacatggccacagcctgagcgccgccgaccgcatacacttcgtcaacgccaagaatggcgcaggtggcgagaatggtcttgtcaggcagaccgtcggcattgttacggctcggcggggttgcgatggcgagggattccacgccggcggcctgtgccggaaccacgttcatgatgacggagcttgggtagacggccttgccgccaggcacatacagaccgacacgctgcactggaatccaacgttcggaaacgcgggcgccctcagccagatcggtgtggaacggtgccggcacctgggaagcggacacggcgcgggagcggcgcacggattcttcgatggcggcacgcacttccggatccaactcgtcgacggcggccttcatggcttccaccggcacgcgcaggttctccggacgaatatggtcgaatttctccgcgaagtcacgcaaggccgcagcaccgcgggccttcacatcgtcaagaatgggctgcacgagttcggtcgcctcgttggtgcccatctcggcacggggcatagcctccagcatttcagctcgggtcagcttcttaccacgcaggtcaatgattcgcatatagttttcttcgctcataacgccccatggtaacaacgtgatgtcacgagaacgcccgcacgtctcaagttcagccgcatagtgagatattcagccgaactttcggcatcatccccacgaccggtcagcccaaaggcagcgaactgggaccgaaaaggattttgatctcagcgaacagactcgtgtcgcggcgcacgcggaaacggtcgccgaacgtcagcaccttggcattgcccttatcgtccatcaacgcgagcttcacttcgcaaggtccaggatgatttgagagaatctgccccaactgctgcacatgcgattggtcaagcgcgatcggcggcagcataatcgtcaccggcttctcatcctgcgcctctaacgttggcacgttaaattccgtggcacgcatgctcaccgtctcatcacgtttttcaacctgcccacgaatctgcaccaccgtatcgaccgccagttcgggagcggcggcctcatataccttgccgaagaacatgcactggatggagctttccaaatcctcaatcgtcacaatcgcccaaggattgcccttcttcgacacgcgacgatccacattcgtgatcaagcctgccaccgtcacctgctggccgtcaggcatattcgcggcacgatcgatcagatgcgcgatcgacatttcactcaacgacaccagaatcgactgcataccgctcaacggatggtcggacacatacaagccaagcatttcacgttcgaaattcagcttggttttcttatcccactcctccacatcgggcacattcaccatggcatcgcccatgcccgcatcgtcttcgccggcatcttccaaatcggagaacaaatcaaactggccttcggcctgcttgcgtttcaaaccgaccaccgaattaatcgcagcctcatgaatcgtaaacaaggcacgacggttcggatcgatcgaatcaaacgcaccggccttaatcaacgattcaaccaatcgacgattcaacgcctccatcggcacacgcctgatgaaatcagggaaattcacatacttgccatgatcgttctcacgttccttgacaatcgcatcaaccgcagccttgccaacgttacggatggcgccaagaccgaaacgcaccacatcgccgacagcggaatactcgtacaccgactcgttcacgtcaggagacaacacctggatgcccatgcgacgagcctcgcccaaatacaacgcggtcttgtctttgttcgtactcgcaccctgcagcaacgcggccatgaattccaccggataatgcgttttcagatatgcagtccaatatgaaatcaaaccgtatgcggccgaatgcgccttgttgaacgcatagcccgaaaacggcacaagaatatcccacacggcctgcgccgcctcctgggaatacccatgctccttcatgcccgcgaagaacggcaccttctccttggccagcacctcgggcttcttcttgcccattgctcgacgcaacacgtctgccttgcccaacgaataacccgccagaatacgcgcggccgactgcacctgctcctgatacacgatcagaccatacgtttcgtcaagcacttccttcaacggctcggccacttcaggatgaatcggcgtgatcttctgcaaaccattcttacgcttcgcataattcgtatgcgaatccatatccatcggaccaggacgatacaacgcgatcaatgcggaaatatcgttgaagttattcggcttcaacgttttcagcaacgaacgcataccatcagaatccaactggaacacgccaagcgtgtcacctcgcgacaacagatcgtacgtggcacgatcgtccaatggaatcttcgtatggtcgatacgcgtcttgccattcgcctcgatattgttcaacgtatcgcgaataaccgtcaagttggaaagaccaaggaagtccatcttgactaaaccaagcgtttcacacgtatgatactccaacgtggtcgtaaccgtaccatcggtacgttccagcagcggcgacgtattcgaaatcggctcgctacccatgatcgtggcgcacgcatgcacaccggtctgacggatcaagccttcgatacccatcgcctcatccgtgacgcgcttcacatccggatcggaatcataaagctcacggaattcgcgggcctccgcataacgcttcgaactcggctcgaaaatatcatgcagcggaatatccttgccacccgtctgcgccggcggcaacgccttggtgatgcgctcgcccatggagaattcgtagcccatgattcgtgcggaatccttcagcgcctgtttggttttgatggtgccgtagatcacgcattgcgcgaccttgtctcgcccgtacttgtctccgacatagtcaagcacgcgaccgcggccgtccggatcgaaatcgacgtcgatatcaggcagcgacacacgttccgggttaaggaatcgttcgaagatcaagccgtgcttgattggatcgagttcggtgatgcccatggcatacgccaccatggcgcctgccgcggagccacggccaggcccgaccatcacaccatgcgatttggcccagttgatgtagtcggccaccacaaggaagtatccgcagaactgcatctgacagatcacaccgcattcgtaatcggcctgcttgagcacttcgatcggcggatgcccgtcataacgccgttccaagccttcctcgacttttttcaggaacagcgacgtctcatcccaaccttccgggcagtcgaattggggcatgaacgcgccatcttcatgatcgtcgaacatgacattgcagcgttcggcgatttccaacgtattgtcgcatgcttcgggaatgtctttgaacagctcacgcatttcttcggcggatttcagatagtagccggtgccgtcaaatttgaatcgtcccggctcgtcaagcgtggatcccgaattgatgcacagcatggcatcctgagagccggcgtcttcggcgcgcacgtaatgggaatcgttggtggcgagcagcggcgcgttcagttttttcgcaatgtccagcagaccgtcggtcacctgtttttcgattttcagaccgtggtccatgaattcgatatagaaattgtcacgtccgaaaatatcctgcaattcgcctgccgcacgtaatgcctcgtcgaattggccgagcagcagtcgcgtttggatgatgcccgacgggcatccggaagatgcgataatgcctttcgaatatttggcaaggatttccttatccattcgggggtatcgcatgacacgtccctcgagattcgcgtcagtggacgccttcatcagattgacaaggccctcatcggtttccgcccacatcgtaaggtgggtgatcaggccaccgccggatacgtcgttggggttgcgcctgcgatgttgcggatcgatatcgggattccagttggtatcccagctgacgcgggtttgatcttggcgtgcggtttccggcgtcacatacgcttcaatgccgataatcggtttgacgccttccttgaccgcagtgctccacatttcgtatgcgccatgcatgttgccgtgatcggtgatgccgacggccggcatgttgagttctttggcgcgcttgaccagatccggaatctttgacgccccgtcaagcagtgaataatgcgtgtgattatgcagttgcacgaaatttccggaagtagccatacgttccaatctaccggtgattggtgacgtgcgatcacacttcaggcttgtcttgtgtgtcgtgcctgccacgcatcacgtcgagcgcatgctgcaaatcagctggataatgcgatttcaccgtggtccacacacgggttcgcggatggcggaattcaagttgcttggcgtgcagccactgccgttccaatcccaatgcctcacccagctgcggattggcaccgtacatggcatctcccgcaagcggatgcccgatggacgagaaatgcacgcggatctgatgggttcgaccggtttccagattcacggaaaccagcgtcgcctcaccgaaacgttccatcacatcccaatgggtgatggcttctttgccggcgggcgtaacgcaaaaacgaaaatcggagactttggcacgtccgatcggcgcttcgatcgtggccttgttttccttgagattgccttgcacgagcgcatgataggttttgacgacttcatgttcggcgaactgcctgcgcatttccacgtaggcgaggtcagatttgcacacgagcatcaatccggatgtgcccacgtcgaggcgggatacgataccctgacgtcccgcggcgccgtaggaggtgatgtgcactcccctgtcaagcagactgccgagcaccgtcggaccggtccaaccgacggaagcgtgagcagccacacccactggcttgtcgaccactatgacgtcatcgtcttcgtagaccactgccatatctcgtgcgatcggttcaggctcggtccgttcctcgacaatatcgaattcgacggtttcgcctgattgcagagtcgatgatttggaaatgtcacgaccaagcacgcgcgcctgtccactttcgatgagttccgcggccttggctcgggagataccaagcatcttggccacggccacatcgaatcgtttgccgacaagcgcgtcgggtgcgggaacaagacggctcatgcgttctggtctccggtcgtctgtttcgtctgttctgcggcctgttcgtcaagatccttctggctgaagggctctccgacaaacagcagtacgacggcggcgacgcccgccaccatcaggaaaatatccgcaacattgccgaccgaccatccgtaattgaggaaatcgacgaccttgccattaaggaaaccttcggcatacatcacacgatcgatgagattgcccaatgctcctgcgaaagcaagagcgaacaccaccgtccatttcatggaaatggtacggattgccagtacggccaacgccacgcatgccacgatggcaagcaacgaaatcaaccaggtcatgttggatcccatgcccaaggacgcacccggattatgcaccagcgtgaatgagaggatgcccggaatcacacgtaccgtctgcccgtcggcaagcgccgactgcgcccatgccttgctgatctggtcgagtaccagtgccacaacggcgatacacgcaaagacggccacgcgggtgcgcagccgtctttgatcatttgtcatgatgtcagacacagcctaatctcagtcgtcctgggagtcctgatcatagttgttcgtgtcggacacctgggacacgagctggccgaggaattcggtaagacgtgcacggtattcggtttcgaactgcttgaggccctgaatgttgccttcgatgaccttggtctgcgcttcgagattgtcgcggacctgctgggcgtagtcgtcggctgcggtacgggtcttcgaatcgtagtcgaaggcgcgcttctgcacttcggactcgtattcgtcggcttcgttgtgcttcgtggagaagtaggtatcaccctcctgcgtcttctgagcaagataggcgtcgccttcctgagtcttctgatccaagtaggtatcaccctcctgcgtcttctgagcaagataggcgtcgccttcctgagtcttctgatccaagtaggtatcaccctcctgcgtcttctgagcaagataggcgttaccttcctgagtcttctgatccaagtaagcattaccttcctgagtgcgctgcgccagatagtcatcgccttcctgagcacgcttggtcagataggcatcgccttcctgagtcttctggttcaagtagccatcagccttggcacgagtgtcagccgaatactgatcggcttcggaacgggtgccttcggagtagttgtcggcttcggtgcgagtgcggttggagtaatcgttggcattgccgatgagctcatcgtacctacgctgggactcgtcggtgatttccttagccttggctttgcccttgtcgacgtactggtcgtgcagctgcatagccagggtcagcatggcggtggcacgctccggctccgtgttggcgctggctgcggctcctgcaatcttctgcaggcttccggtttcggtactcggttcgaccttggcgacctgctcgcgcagctgggcttcacgctgctgcgattcctgcagctgctgtgcaagctgctgaatctgcgcggcctgctgctgggcacgctcatcctgctgctgggactgtgccgcatgctgctgcgtgagctgctgagcttgggcgacctgctcctgagcctcttcaagccttgcattgagctgctggatctcagccgcctgctgctgggccaccacaacctgctgctgtgcggaagccagctgacgggacaggtcttcggtctgtgcacggaatgcgtcgcgctcatgctgcatggaggtcagctgttcgcccagatccgcctggcctgcagcttcagccgcctgtgcggtgagctggtcgacctgtgcggacaggcgatccacctgacccttgagctgttcgttctgagccgacagagcacggttgctttcctcagcctcggtgagcttggctgctgcgacctgtgcggcctgagctgcctgatcaccagcgccagctgcctgctcggaggcggacttcaatgtcgcgttctcctgctgcagggactgaacctgggcgctgagctcggaaatcttggagttgagccccgcaacatccgggccgagggactgagtagcctggccgctggcaaccgcctgcttgccaagggcctccaccgtctcggttacctgatcgagaaaatcgtcgacttcatcgacgtcatacccctccttgaacctcacggtctggaaggtatgctctctgatatctttcggcgtcaacagagccataaatcttacacctcgctttgggcttgatgccttgctgttgttgctttcattgttcgactctagcacgggaccaccgattttttgcgaaaaatcggcatttgacatacattaaatgaggaaatcaatagcaatgagaatgaaataaagaacgatgaatgccacatcgaagtagatgggacccaatggaatagggcggatatattggcgtagccagcgcagtgggggctccgtcaactggtaaaccgcgtcgatcaacgacgacaccaacccccgtggacgccatgccgatgccaatacagcaacccaatcgagaatcatgcgaatgaacagcaccagaatgtaggcattcaccaaaaagtggacgatgctaccgatcaaagacaaaatcatggggcaccaccttagcaacagaacataacaaagcccccatcacgggtgacggaggcttcatgcagtctgctttcgcaacggctttcgtctatatcagtcggcgaacaaatcgtgcgacgagttattcgcctgcggttcctcaaccttgatgttcacctgagctgggctcagcaggaacacgcgcggagtgacacgttcgatggagccacgcacgccaaaaaccacacccgcggaaaagtccacaatgcgatacgccacggcctcggccacaccggtcaggttcagcaccaccggaacgccgtcgcgaatggcacgtccgaccagctgagcgtcctcataggatttcgggtgaatcgtggtgatacggctcacccttccgccttggaacgggttggctttggtctgctcgcgcggtgcggacgtcgcggcaggagtcgaagccatcggggtcacggaatggtcggaatcgaacgaggtttcgctgctctcagcctcttcgttgaaatcctcgtcaccttcggcaacgtcggtcatgcccaaataggacatcgcgcttttcataaaacctgccatgaacgatcctttcgcgtcttcgcgttgcttttagcgcaggaaatccggaatatccaaatcgccggcatcgttcgaagacaccacttcatgctcggtggtctggtcgaatgacggaacgacgggttccggagtggacggaatataagtggacagcggctgcaccttcggggcttccggagtctgaataagctgaggctggggctgctgcggaaccgccgctgccctcggggctgcggacaacgccgacagcggcaccgtgctttccgcaggctctgcctgcttctgggcttcagcctgagccgccttcttggagttggcatcaaagcctgcggcgataacggtgacacgcacttcgtcgccgtaagcgtcgtcgagggaaagaccccagatgatctgtgcttccggatggatggccttgcccaccagctgggtggcggcggccgcttcctgcaacttcagatcggacgggccggcgatattgatcagcgcgccgtgggcaccctcgatgctttcttccagcagcggcgagctgatggcgatttcagctgcctgggtggcgcgatcctcgcctcgtgcggaaccgatgccgaacagtgcggtgcccgcgccacgcagaatagcgttgacatcgttgaagtcgacgtgaatgtacgagttcgaagaaatcaggtcggtgatgccctgcacgccggccagcaaggcggtgtcggcggtcttgaacgcatcgacgatgccgatggtgcgatcggaaagctcaagcagtcgatcgttcggaatcacgatcagcgcatcgacttccttgcgcagattctcaatgccaagtgctgcggaagccgcacgctggggaccttcaaagctgaacgggcgggtaaccaccgcaatggtcagggcaccctgctgatgcgcggcgcgagccacgatcgggcttgcaccggtaccggtgccaccaccctcaccgcaggtcacgaacaccatatcggcgcccttgagcgattcctcgatatcggactgatgatcctgagcggccttggcacccttctccgggtcggcacctgcgccaagcccgcggctggtggcatcgttcaaggagatcttgacatcggcgtcggaacgcatcaggtccttcgcgtcagtattgatcgcaatgaattcaacactttgaagaccctcggcaatcatgcgattgacggcattaccgccagctccaccaacaccgacaaccttgatattcgttttgtcgttgaaattgtcagtctgggcaatctcgctcaccatagtctcctgtcactcgcgtttacgcacaactttatcgcagacacgctgcagtacgcgcacttttcgccgtgtgtaacggcgttttttcacttttttattgctaacgtgttcatttcgcctgcgatttaccccctttcggtgcccccacgacgatttaaccacatcagcatgtcatattcaatagctggcgtccataggatcatccccaaacaacgcctgacgttcatcatgcgttgtttcccgtgattccaaccatccgtaaggcagatgcactttctttgcgaagcgcacgcgcccccttggcttgtcgaccactcgctcgggaaaacagatgttgggatccagcttgcctatttcggctctgacatcctcaagattttcacattccatgaacgcgcgacgggtggagcctccaacggggaatcccttgagataccacgcgatatgcttacgcagatcatgcacggccatctgctcatcgccatcatagaattcggtcaacagttccgcatggcgttcaaccacacggcacacatctcctaacgtggggtcaacacgcttgtcgctgccagcgaacgcattcttgatatcggcgaacagccatggcctgccttggcagccgcggccaatcgcaacgccggcgcaaccggtttcggcaaccatggcaagcgcatcgttcgcaccccaaatatcgccgttgccgaacactggaatgtcaagcgcttcgaccagctcgccaatccggctccagtcggaatgcccgccgtaatattcggcggtggtacgcgcgtgcaaggtcaccgccttgcagccttcctcctgcgcgatatggcccgcttccaagaacgtttcatgctcatggtcgatgccgacgcggattttagccgtcaccggcacgttggcagcatcgcagaccttgaccacacgctggatgatctcgcgaaacagatccgtcttccacggcaaagccgatccgccgccgcgtcgggtcactttcggcacggggcatccgaagttcagatcgacatggtcggccatgttttcgtcgatgacgattttcgcggcctgttccacgatcgccgggttcacaccgtacagttgcagcgaacggattttctcgctcggcgcgaaatggcacaaccgcaacgctttgggattgcgtgcgaccaacgcgcgcgcggtgatcatttcggccacgtatagaccgtccggtccgtagctttcgcaaatcacgcggaacggccagttggtaacgcccgccataggcgaaagcaccaccggggtttcaacgtgtaccggccctaaatcaacaggcttcataaccggaggaaccgacggcctcaccgcgtcggtacgcgggtcgagcacgtcggattcctcgtaagcagtcacaatgctatctggcataagaacgctatggtaaccagtatccagctttaatacaagccaccggcttcggcgatcttgacggactcaggccaagcctcgccgcccatctcaaccggcacctgcgggtaacgtacatgcttctcgccaatacgtgcggccacataatcagccaccttgtcgagtgcgacgcgctcctgctgcatggtatcacgttcgcgaatggtgacggcctgatcgtcaagcgtgtcgaagtcgacggtgatgcacagcggggtgccgatttcgtcttcacggcgatagcgacgaccgatcgcaccggcctcgtcatagtcgatcatccagtcatgctgacgcaaatcggcggccagatcgtgtgccacggtctgcaattccggcttcttgctcaacggcagcacagcggccttgaccggagccaggcgcggatcaaggcgaagcacggtgcgcttatcgacgccgcccttagtattcggggcctcgtcaacgtcgtaggcgtcaacaaggaaggccatgagggaacgggtcaggccggcggccggttcgatgacgtacggcacgtatttttcgccggtggcctggttgaagtagctcagatcctcgccggaatgcttggcatgcgcggaaagatcgaagtcggtacggttggcgacgccttcaagctcgccccaatcggaaccctggaagccgaacttgtattcgatgtcgacggtacgcttcgaatagtgggccagcttctccttcggatgctcataatggcgcaggttctccggcttcacaccaaggtcgatgtaccactgggtacgcgcgtcgatccagtactggtgccattcctcatcggtgcccggagccacgaagaattccatttccatctgctcgaactcgcgggtgcggaagatgaagttgcccggagtgatctcgttacggaaggacttgcccatgttggcgatgccgaacggcggcttggaacgcgaagaagtcatcacgttcttgaagtccacgaaaatgccctgtgcggtttccggacgcaggtagtgcagcgagttctcgtcttcgaccggtccgaggtgggtgcgcagcatcatgttgaagtcgcgcggttcggtccagttgccacgggtgccgcaatccgggcacacaatgtctttcaggccgttttccggcagcttgtcgccatgcttttcggcataggattcctcaagcttgtcggcgcggtggcgcttgtggcagttgaggcattcgatcagcggatcgttgaacacggacacgtgaccggaagccacccacacggccggcggaagaataatggacgtgtcaacgcccaccacgtcgccacgggtgacgaccatggaacgccaccattcgcgcttgatattgtctttcagcgcaacgccgagcggaccgtaatcccacgcggaacgggttccaccatagatttcaccggcgggaaaaacaaagccacgacgcttggcgagggatacgacttcatcgagtttggatacagccacaatgcaccttctggtttgaacggtttggggtctttacaagcgcaaagcctacctttacgcggtgacagaacaccacccgcgttactgtttcgtggcgttctcgtcttcaaccgtgtcgttgtcaagcagcagcggccagatcttgcagccaatcatcacggttttcttattcagatttgcctatgagatttacgtacgcacctacatttacgagaacgtgctgcattcacctgatcccggaatcgactggcccgctccagtgtcagggcctttgtataggttgagtacgttatgtacatgcaggggggctttccgacgaaagtggaagctgagataggcggatgcctgaccctttgaacctgttggttaggaccaacgtagggagcagacaatgagcgatgactcattttcggcaacgctgcgcaaacagattgtgcaggcagtcaacagagtacgagagaccacgcctttggcgcagtcgtttaccaatttcgttacgatgaatcttgtggccaacgcgcagcttgccgccggaggtactgccgccatgagctttctgccggacgatgtgatcgacactgcggaaatcgccggatcgaactacatcaatgtgggcacgctgctgccgttcttcaaagatgcgctgccggaaatcgcctacaaactgcacaagaacggcaagacgtgggtgctagatccggtcgccgcgggcatcggcaaaacccgtacagccattcttgaatcgttccgcacctacacgccaaccatcgtgcgtggcaatgcgagtgagatcatcgcactcgatgcgatgtggggccttgctcaaaatgattctaccgttcccggcacgcgtccggcaggcgtggaggctgtggacgaggtcgatgcagccgttgatgcggccaagaggctggcccgccatcttgtgaaacgctcccccatcggcgctggtgcggtggctgtttccggtgcggttgatttggtgaccgacggcgagcatgtgttccgtctgccaggcggcagcgcgatgatgacgaagatcaccggcgctggctgctcacttggcggcgtgaccgcaacatatttagccgtagcggaaccgttggtggctacgatttccgcttcgctgctgtacaacagagcttccgaaatcgccgaagcgaaatcttcaggcccgggatccttccaagtggcgctgcttgatgcgctttggaacgtcaccgccgaggaagtcgccgcctccgaaatcatcgtcgactagactttgccgctgctctgcataccatgcggcatgttatgcagagttcggcaattgcgtatgcggaaaaacggacgaatgccggtttcacattgtaggctttccgaaccacttaccgagaagggttgattatatgaacaattattcatatgcatcgatgcgcgatacattcgatatgagcgcctactttgtggtcggcccgcaggattgcaaaggacgaccgattaccagcgtggttgaggacgcgctgcgcgggggcgcaacgttcatccagctgagggccaaagataccgacgcgaaagatatcaccagcatggcacgcgatatcgcacaggttatcgaacacaacagcaaatccgattccgtggcgttcgtgatcgacgaccgtgtggacgtagtctggcaagcacggcacaagggcatcaaggttgacggcgtgcatattgggcaaactgatttggagccgcaggaagcccgcgcgctacttggggaagatgccattgttggcttgtctgccgaaacggaaagcttggtgaagctcatcaacgagctacctgccggctgcatcgactacatcggggcaggtccgttgcatgtgtccaccaccaagccggaagcttccgtgggcggcaacgacggttccggacatacgctcgacgaggcacaaatcaatgcgatctgcgatgcgagcgattttccggttgtggtcggcggtggtgtgagcgccgacgatatggagatgctcgcgcattcgaaggcagccggttggttcgttgtgtcggcaatcgccggcgcaagcgatccggaagaggcgacccgcaatatggtttcgcggtggaaggccgtgcgcggcgacgcaaagcacgggcacgtgccgcacaagtaagaatcacggatcacgagtatttcaaaacttcagatcataagtaagcaagagcaagtaaggagtcattcatgaccagcacattgccaccggtgttgagtatcgcgggatcggattcctccggcggcgccggtatccaggcggacttgaaaaccatgctcgccaatggcgtattcggcatgaccgccattgcggcgctgaccgcgcagaacaccacaggcgtgacgatggttacgaacacgcctgtggaaatgctggccgcgcagatcgacgccgtgtttgacgatattccgccggtcgcggtgaagatcggcatggtgtcgagcgctgagctcatcaatgtgattgccgaccgtttgaccgctcatgatgccgagaatattgtgcttgatccagtgatggtggcaacgtccggtgcgaagcttatcgaagatgacgcgatcgccgcattgacttccaagctgttcccgctcgccaccgtaatcacgccaaacatgccggaaacccaagcattgtgtgagctggctgttgagcagggtgccgatgcgatcgactatgagaatggcgaaaacatctccagcgaaaacgacatggtgacggcaggccatctgcttgccggacatttcggctgtgcggtgctcgtcaagggcggccatggtacgcaggatgccagcgatgtgctcgtcgaaccgagcggcaaagtcacttggttccgcgcgcgccgcatcgacaatccgaacacgcatggcaccggatgcacgctgtcgtcggcgatcgcatcgcacctggcactcggcgagacgttgccggaagccgtcaatagtgccaaactgtatctgacgggcgctttggaggcacagcttgacctcggacacggatccggaccgatggaccacgcttggaaatggcgctggtcgccgctcaacaatccaagccatatcaagccgatagaaacgcaacgaaaggaatgcacatgacccttgatcgcaatgcggaaaagcaggaagtgccgatcaacccggaaaccggcaaaccgtatatcaacacgcttgctgcggtcgccatctctcccgctggagcaagtcctgaaaagtccacgtacgtagcgcaggcggtcgatgtgatccgccaatccggactgccgagcgaaaccaacgccatgttcaccaatattgaaggcgacattgacgacgtgctcaaggtgattcgcgacgccaccatgaaactcgccggtcagggctatcgcaccgacgtggtgatccgtctcgacattcgcccgggtttcgaaggtcagatccacgccaagcaggcacttgtggacgaaatcctgtcggaataaatcaggcaataaactgttagatcgtcagaaaaatcgaatagcgcgctatttataaggaatggcgcgcttttcttattgatttgggtatagtgtagcgaatatgactacgatgaaggaaattgccgaagcgacaggggtgtccatttccactgtttccctggtgcttaacggcagggatgaaggacgtgtgaaagcccctttggccgcgctcgtacgcgagaaggcagacgaactcggctacacggtcaatcctctggcgcgcagcctgcgcacttgccgcacgcgaattctcggcttcatcagcgaggaagttgccaccacgccgtacgcaggcggcatcattctgggcgcgcaagacgcggcaagcacctacggatatatgattatcacggtcagcaccgatggcaaggcaagcgaagagaatgaaatagccacattgaaacggtatggcgtggacggtttcttctattcgaagatgtcgaaccgcattgcgaccgtgcctgcgtctctcggcgactatccggtggtgatggtggatgccaccgatgccgacaaccagatacccagcatcgagccagacgaattccaaatcgcctacgatgccacgaaacggctgatccaagccgattgtgagaggatcgcctatctcggatgttcggaaaacatgattgcgcaggacggtcgttttgctggatatcaggcggcattgcaggattccggttttgcctacgatccttcgttggtgtgcaatgtactccataatggcccggcgttgcgcgccgtcgataagctgttcgatgaacgcaatcccgacggtttcttctgtttcaacgatgcgcgcgcgtggtatgtgtatgaatgtgcggcacgtcgtggactgactgtcggcaaggatatttccatcgtcggcgtcgacaaccaccgcgtgtttgccgaaacgctggaaccgcagttgaccacagtggagctgccccactatgagatgggttattgggccgcttgtaagctgatttcactgatcgaacgcaagcccgtcgacagctcgtcctggccgagcaccaccgctcccctgccaccgttggattcgccgatccccgcgaagatccattgcgcgctgatagaaaaggggtcagtccgaagctgatttccttgatttgagatcatgcaagaaggtcttttgacatgtctgccgcgacacgccgaaggccttctttttatacctcatttcggcttaattacaacactttcgagaagtgctgtaattattgacgtcaatcgattgacgtcaatcgtttgacacgatattatttaaccatgttcattcacttggcacggcagctgggtgaatgacggcataacacggcatcggccaaacaatgaagtgctgcgcggcagtggcaccaacaaaaagaaacagagaaacaacatgacaagcaacactcgatccgcatggaggaatccttcctatctgcagagttccttcggcatcttcatgttcttctgctcgtggggcatctggtggtccttcttctcccgctggctcaccgacccgacccacggtctgggcatgacctccgccgagcagggccagatctactccatcaactccttggcaaccctggtcatcatgttcgcctatggtgccatccaagatcagctgggcatcaagcgcaagctcgtgatcttcgtttccgccatcgcagcgctcgtcggcccgttcgtacagttcgtgtacgccccgatgctgactgccggcggcaccacccgtttcatcggcgtgctcatcggctccatcgtgctctcctcaggcttcatggccggctgctccctgttcgaagcgctcaccgaacgctactcccgtaagttcggcttcgaatacggccagtcccgcgcttggggctccttcggctacgccatcgtggcactgtgcgcaggtttcttgttcaacatcaacccgctgctgaacttctgggtcggctccatctgcggccttggcatgctgtgcgtctacgctttctgggttccggccaagcaaaaggaagagctcaagaaagaagccgatccgaacgcggctccaaccaacccatccttcaaagagatgatctccgttctgaagatgccgactctgtgggtgctcatcgtcttcatgctgttcaccaacaccttctacaccgtgttcgaccagcagatgttccctaactactacgcttccctcttcccgaccaccgaaatcggcaacgccacctacggcaccctgaactccttccaggtattcctcgagtccgccatgatgggcgtcgttccgattatcatgaagaagatcggcgttcgtaactccctgctgctcggcgcaaccgtgatgttcctgcgtatcggcctgtgcggcgtgttccacgatccggtcagtgtctccatcgtcaagctgttccactccatcgaggttccgctgttctgcctaccggcattccgctacttcaccctgcacttcgacaccaaactgtcggcaaccctgtacatggtgggcttccagatcgcttcccaaatcggtcaggtgatcttctccaccccgatgggcgccctgcatgacgccatgggcgaccgtccgaccttcttcaccatctccggcatcgtgctggccgccctaatctacggcttcttcgtgatcaagaaggacaaccaggaagtcggcggtgatccgttctacaccgataagcagctcaaggcccaagccgcagctaaagcaaacgcctgagcgcaaccgccaaaatcggcaaaaacacaactaaatcgtgctgcccgaagcgtttcccctttttccgcttcgggcagcattcttacaacttttactcaaaactcaataagcagcaattcaacaatcacaagaaaggctattcaacgatgactggcttcaccccggacgcacccgtccttcacgaaatcaagaaccacagcgaggctctggcacaggcggaggcgggcgttgcagccatggccgccgcgcgcaacaaccgttggtatccgaagttccacatcgcctccaacggcggctggatcaacgatccgaacggcctgtgcttctacaagggccgttggcacgtgttctaccagctgcacccgtacggcacccagtggggcccgatgcactggggtcacgtctcctccaacgacatgctcaactggaagcgtgagccgatcatgttcgccccgactctcgaagaggaaaaagacggcgtgttctccggttccgcagtgatcggcgatgacggcgagctcaagttctactacaccggccaccgctgggccaacggcatcgacaacaccggcggcgactggcaggtgcagatgatcgccgagccggacaacgacgagctgaccagcgccaccaagcgcggcatgatcatcgattgcccgctcgataaggtcgaccaccactaccgtgacccgaaggtgtggaagaccggagacaagtggtacatgaccttcggtgtctcctccgcagaaaagcgcggtcagatgtggctgttctcctccgatgacatggttcgttggacctacgagcgtgtgctgttcgagcacccggatccgaacgtcttcatgcttgaatgcccggacttcttcccgatcaaggacgccgagggcaatgagaagtgggtcatcggcttctccgccatgggcgcaaaggcctccggtttcatgaaccgcaacgtttccaacgccggctacatgatcggcacgtggaccccgggcgaggcgttccagccggaaaccgagttccgcctgtgggattgcggccacaactattacgctccgcagtccttcaacgatggcgagcgccagatcgtatacggctggatgagcccgttcgttgagccgattccgatgcaggatgacggctggtgcggcaacctgacccttccgcgtgagatcaccctgggcgccgacggcgatctgcacaccgctccggttgccgaaatggagggcttgcgcgaaaacaccaccgatttcggtgcgatctcacttggtgtcaatggcgagcagaccattgctgacgatgccgaagccgtggaaatcgaaatgaccatcgatctcaacgcctccactgcggaacgtgctggtctgaagattcatgcgaccgaagatggcgcttacacgtacgtggcgttcgacgatcagatcggtcgtgtggtgatcgaccgtcaggccgcagcccagggtgatcgcggctaccgtaccgccccgctttccgccgaggaactggcttccggcgaactcaagctgcgcgtgttcgtggatcgcggctgcgtggaagtgtatgtaaacgacggccgtcaggccatgagctccttcagctacgcttccgaaggcccacgagccatcaaacttgttgccgaatccggcacgcttgaggtcaagtccttgaagctccacaccatgaagtccatcggactggagtgaggctaatccaaggcagtagcaaggggtaaagagtaaggcgggtttcgtgtcgaatgagatacggaacccgcctttcgttttggtttggaacgtggtttagggagtgctttatactggcaccccggtaatgaacttttctgaccggaacgcgggcaggctcctcaccttactgatttctcgccaccggtcacgtgcgcgcccactatggcgcagaaagcaaggtgaacgatggcggtttcgcacgttcaacgcagggattcggcaacaggatccataccctcaaacacgagttcgcacatgggttcgggcatggctgcgaacacgaattcaaaagccggcattgtcgcaaaacttctcgaagctttgtccgcctttgctcacgtttgcaaacgccgtattcccacagtcatcgcagtagtgttgctgttggtggtttgggaggcgtgggttcgtatcgacaatgtgcccagcaccatgattgccgcgccgagcgaaatcgcgcaggccaccgtcgaaacctggtcgacgttatggcccgccacccaagttaccctgattgaaggcaccgtcggttttctgttcgccgtactgttcggcattcttatcggcatattgttatactgctcacgcattgcgaacgccgcattgctcccgttgctttcggccgcgcagaccatgccgttgatttccatcgctcccctgttcttgatttggttcggttttgaaatttctggaaaaatcgtgatcgtaacagtattcggcttattcccgattgcagtgcagacgattcgcggtcttgaagcggtcccccagttttattcggatgttgcgctgacttgtggtgccacgaaaacgtggacactgtggcatgtgaagttgcgtgttgccgctcgtcagatttatggtggtatccgcgtttccggcgcatacattttcgccactgctgccaccgcagaatatttgggtgcacgcaagggtcttggcatttggctacaggccgcctacaactcgttccgcacaccgctgatcttctcggcgacgctggtcatcatcgccatcaccggcgttctgatgtgcctggtgaacctcagcgaacgcgtcctgctcggcccagctgatgccgacgccgatcccgatgcagaccagtaagtcaaacacgccaaacatcctcggccttctgcaaacgcagcattcgccactccgcattgcatgtcggtcacgctgcctacgtataataaaacccgctgttaagccaatgcgtggcaaaccggcaatattccacgcctttcactaggcaccgtaaggaatgtcgggggcattggacgagcgggggcctgaggcccttcgtatcgttttctgcccgaactccgctcgcagcatatccctagaaaacgatagagaatacagattcaagggaaatcgctttatgagcatcttcagcaggcatgacgccaccgcacgtactcacatcgcaagcacaataatcgcactcttcagcgcaatcgccatgttgttcagcgttaccgcatgcggacaaagcaacgattccgcaacaagcacagcatctggcagcagcgatctgaccaaagtgaccttcatgctgtcctgggcgcccgacaccaatcatatcggcgtatatgcggcgaaaaacaagggttatttcaaagaggcaggtcttgacgttgatatcgtggccgtggcacaggccggtgccgaacaggccgtgaacaacggcgtggccgacttcgcattgtcgaacctcaccaacgtaagcacgtacgctgttaagggcgcaaccatcaagcaggtgctgcaggtacagcagaagccaagcgccatctggtgttcgctcgcttccaacactgaaatcaaatccccgaaggatttcgacggcaagactttcgccacgttcggatccaacgaatccgatgcggtgatccgtcgcatgattcagtcggacggaggtaagggcgaattcgacaaggtgaccgtcggcacgtccacgttccaaacgctgtccagcaacaaggctgatttcggtggtttctatgccacttgggagggtgtgcaggccgacatgtacggtccgaagctcaactgctttaccgaaccggattacggcgttcccggcaatgccgacactattggcgtgatcaccagcgacaagacgatttccaacaatcccgaactggtgaagaagttcgtacaagccaccaagaagggctacgagtacgcatattcgaatcctgacgatgcagcgaagatccttgtgaaggaagctcccgacgcgaatctcaagcttgatttcgtcaagaaaagcatgaaaaccattgtggacggtcagtattggggcgatcccgccaagatcaaggatggttcgttcacgttcggtacgaacgacgttgaaggcgcccagcagtatttcgacttcctcgctcaggaagacgcctacaccgattcgcatgacaagctggtgcacgacgctccgcaagccaaggatctcgccaccgacgaattcctgaaataatcgggtttgaacgagtaggtttgtaacccgtttaggtgcgaataatcgaaaatattggaatacggcatcctgcatttttatttcatgcccaacactgcttgctcagttcgggttgaacatggtttgtgggatgccgcaccattatgcgttgcatttggcttcattgcacgagtttgattaaatacaaatatgacacgactgattcttgatgtggacaccggtatcgacgatgcactggcgttggcataccttgcgacgttcgacactgttgacgtgcttggcgtgatcggcacgtacggcaatgtttccgtcgacactgcggttcgcaatacttcgtatgtgctggaacggttggggcttcggcacattccagtgatacgtggatcgtcacatccttcatgggctcggtgtttcattccggatgcaggttgtgcgcagtttcacggcacggacggattgggaggattcggcccggcttgcgatagttcgtcttcggatactgctttttcagatattttttcggataattccggttctgatactgttttttctcgtgattatcgtagtctgatttccgttggcggatatgcgttggatgatgttcatgcgaatcctgcggttgattcgtttgaattgtcgcttactacggattcggcttcttttattcatgttgatgattcttccgccgactcggtttccgaaggcgtgcagttcattattgatcaggttcgcgcttatggtttcgacgtcactgtggttgcgaccggtccgctgaccaatattgatgctgcgatcgcggccgcaccggatattgccagcaaactcaaactggtgatgatgggcggcacgttgacgcaggaaggcaactgttgggatctgactgcggaaacgaacatcattcaggatccggaagccgcagatcgcgtgttccattccggtgccgacatcaccatggtcggcttggacgtaacgcatcaatgcctgatgggttccgatgcgacccgtgcttggcgcgaagcagcgaatgctgacacacttaccagctcgaccgcatcccaagtcgctgattcacttgatggttcagctggtagttcaaatgcagcttcagctcgaacctcgagtgtggctgcaagcccatctgcttccgatgtgcgcgtattcctcgccgacatggctgatttttccattgccgcaaacctcaaggccgacgcgcgactgttttcacagggcatgccattacatgatccgctggccgccgccgttgccgtggacccgtcgctggtgacctgtatcgacctaccaatgaaagtcgaactcgaaaccggcgatttccacggcacccgaggccgaaccatcggcgatcccgccggactgatcgactccaacgcaccccgcatccacgtagccttccaagtcgactcctcccgtttcgtccccaccttcaccacccgaatcagcacgttgtagcaaacaaaacggggagaacattatgttctccccgcagttaacctaatcaactcagcaaaaactactttttgacgccgccgaaacgacggtcgcggtgaatgtagtggtcgatcgaacgccatagcacgtctcgaccgcaatcggggaacagttccggcacgaaatcaagttcggcatatgccgcttcccacggcaggaagttcgacgtgcgctgttcgccggaagtacgaatcaccaaatcgcaatcaggaatatcaggattgtacaggtgttcggaaatcattttttccgttacgcgatcgccggagatcttgccgtcacgcacttcctttgcgattgccgcgcaagcatccgcgatttcggcacgtccgccgtaattcaggcagaacatcacgtcgatggtcgtgttgtttttggtacgttcctgtgctttttccaattcgtcgataacggatttccatagtttcggacgtcggccggaccagcgcacgcgcacgccccacgcgttcatctgctccacacgacggtggatgatatcacgcgagaagcccatcaggaagcgcacttcctgcggggaacgcttccagttctccgtggagaacgtatacagcgacaggtaacgcacaccggcttcgatggcacctgcgatggtgtcgaacaccaccggttcggcagcctgatgcccgtcggtgcgaatcagcccacgctgctgcgcccaacgaccattaccgtccatgatcacgccgatatggcgcggaaccttgttcttcggaaaatcaggaataatcgacgggtcagaaaatggtgccgccggaatgtcaagggacttgtaatccacgttctcaaaagccatacccgctaatctagcaagcgcatggaacgaatcggacgttccaaatagtattcaccccatttttccaccatttgtcgggtttccggaagcaacgccgtaccgtccagctctccccaatcgccgtctacaagcgcctgcaactggcagatcgcattccacgaaacatcaaacgattcacgaatatgatcggtcaaacacattagtccgcccgcggaaattgaaaagaaccatggacgatcagcagaaatcggctccccgcacaccacgcaggcacgcaaacgcggcgtccaaccagcgatcgcaagagcacgcatcacgtaggaatcgccaatcgcagcagcctcatgcgcatgcttggaaagggcattcaacgctcccagcaccagccgatactgtgccacggaacgctcctgctccgtcactaccagcttgtcagcggtttcgcaaatcacattcgctgcggtatacgccttgaaatcggtgcagatgcctctcgcatacgccgacaccgactcggcttgggaaatcacatcaagcgaacgcccttccgcaataagcaacgagacgcgcatgaaaggctccaaacgacctccgaaacgcgatttggttcgacgcacacctttggcgacggcgcggattttgccatggtcacgtgtcagcaaagtgacgatacgatcagcttcgccaagtttgacggtacgcaagaccacgccctcgtcctgatacaacggcattcacacacctccttcgcctcgactcgttttcttaactgaactatctatactttccgcacgttctcgcgccagccgcactctcccgcgatatcagtaaataaacaatccccagaacgcgaacaccaacagcacatacagcatggtgaccgccgtgatccaaaacatcacacggccgaacctcgtcgacgcgagcaccggctggcggccactcacaatcgcgcctatagcccccttacgcggtggccattgtgcaagaccacgattcgtcgcctcctcgataagacgcacgaacacgcgagaccacgcccacaccacaacaacacacaccatttgaataaccggccaactccaatacatcatgcccggatcctcggcgggagcgccaccccacgctagcttgaccacgcccataaccacttcgctcaatcctgcaccaaacagcacaaaagtggccatggtggcaacggcaagcgtaatcaacgcatttttgaacacaggtctcagccccaacacatatcggcgtcgatgcgcatgcgcccaaatcttacgtacgagcacaatcagccacagcacgccgatcaccagtagcaacagcaccatgctgacatgcagcaccacgagataaatggtcagcccgctgttcgcctgcaattccaacggcaccgcaatcgactggtacaggttagtgccggccacacgttcgctggtctgctccagtccttgcgtggtaccggcggcccaactgatcacatcatccacgtaggcgtcggcgaacggagtgccgctgttggattcgtcgccgagtcggagcacatggttggcgatggggtatgtgcgcacggtcacgtcccaattgcccgccttatgcgccatgtcgatgattttctccgtaccttccacctgcgcggtcatcacgtctttggtgccgtatgccacaagcgtgggaatggaataggcttggggattcaacgtgtcgaggtcgagattggtcaggccgaacaattccgcatcgatgttgaacgcgcggcgcacaatggactggtatccatcatgcgctccgaccagcgcgaaatcctgtgcggcaaggaatcccaacgaatgtcgtggcgaatacaccattgggctcagcaacacctggaatgccacgtcggggtcttgatcaagcagatatgaggaaatccaagtgctttcggaagtcgcgtaaatgccgacattcgaagcgtcaacgttgtcgagatcacgcaacatggtgatgacctgatcgtaaatggccgcggagcccgggtaatcacgagtcgcatcgttggtggaccataccggcttgtcgagcacggccgtcacgaagcctgcggatgagagatcggtggccatgtctccaaatgagttgtcacaggtaccatatccggcaccatgcatgaacaccacgccgggccgattgtttcccgcgtctttcggctctcgaatcaacactttgacctgttgtatttcaccggttgacggctgtttcgcctcaatggtgacatatcgttgcgtcacttcgtaatcgcctcgtttggcaagggttttgccggaaggattatcgaaggtcactgccgtgtcggatgataacgtttcgatggtttgaccggttggctcgtacttccatgacgatgccgtcaaattggataccgacaccagaatgcccagcaggatgatgaagataggcagactgaccatcagccgtctgcccctcgtccactgactggattggctctccgcgctggacatgactgactgacgttcctgatctgacacgccgttcattgtaccgactccagctgaaatggcaatcgacaaccagcaaaaccagcgggcggccgatcacaatctgcaatcgaccgcccgcggtcagcgaaatcaacaattaccttgcgccaccggcaccgccaccggtcctgtggcgttgacgggcacctgtccgtccgcttccatctgcgcggcgatctcctgcgctttgaccagcagcgtttccacaatctggtcttccggcacggtttgaatgactttgcccttgatgaaaatctgtcccttgccgttgccggatgccacacccaaatcggcttcacgggcctcgcccggaccgttgacgatgcagcccataacagccacgcgaatcggcgcggtcacatcctttaaaccttcggtcaccgcattggccaactgaatcacatcaacctgggaacgaccgcagctcgggcaggagataatgtcgaacttgcgcggacgcaatcccatgtattccagcagcttgcacccgactttcacttcttcgacgggcggtgccgacagcgaaacgcgaatcgtgtctccaatgccttcagccagcagcgcaccgaatgccaaacagcttttgatggtgccctgccatgccggtccagcttcggtgacaccaagatgcaacggccaatcacccttggaagcgagcagacgatacgtttccaccatggtgatcacatcatgatgcttgacggaaatcttgaaatcatggaagccgacgtcttcgaacatgcgcgcttccttcatggcggacgcaaccagtgcctccggcgtcggaccgccatatttcgcatacagttccttatcgagcgagcccgcgttcacgccgatgcgcaacgaaatgcccgcgtccgtggcggctttgcaaatggaagggccaacctcgtcgaatttgcggatgttgccggggttcacacgcactgcagcgcagcccgcgtcaatggcctggaacacgtatttgctttggaaatgaatatcggcgatgaccggaatcggtgatttctttacgatttccggcaatgcgtcggcatcatcctggcttggtacggccactcgcacgatatcgcagccggctgcggtcagttccgcgatctgctgcaatgtcgcgggaacattggctgtcagcgtattggtcatggattgcaccgagattggcgctcccccaccgactggaacgggaccgaccataatacggtgcgatttgcggcgcggatgcagcgggctttcgctaatggctgcctcaccggttttacggaacggcttttcgatttctggcatacgtcaaatccttgcaataacaaggctcccgacttagggagccttgcgtcacttacgtttcgtctgtttgttttgtttcgttttccgttacttgtttatcaggtcgtcggctcgacgacgggcttccagctcgagttggctcatttcctccacggaagcgaatagcggattgccgcgcagttccgcatccatttcgtccaacacttccttgacggtatcgacgatgccgagatatggcaagcgatgttcgaggaaggcgtgaacggcctgttcgttggcagcattcagcacggccgtatgcttttcggaagcttccaagcaatgtcgagccaagctcactgcggggaacgcctcatcgtcaagcggttcgaacgtccacatggcggctttcgtccaatcacaggccgctgcgatgttgccaagtcgttcgggagccgataggccaagcgcgatcggcagacgcatatcaggcggtgaagcctgtgcgatggtggcgccatcgcggaattccaccatggaatgcacgatggattgcgggtgcacggtcacgtcgatacggctcggaggcacgtcgaacagacggctcgcttcgatgacttcaagccccttgttcatcaacgtggacgagttgatggtcaccaccggacccatattccaagtagggtggttcaacgcctgttcaggcgtgatgtcggtcatctgctcgcgtttccaaccgtggaacggacctccggaagcggtgaccacgagtttcgacacttcaccgtgcgtgcccgaacgcaacgattgccagatggcggaatgttcggaatcaaccggattgatctgctgcgcacgaacctgtgcgtcgaacagcagatgaccgccggccacaacggattccttgttggcgagcgccagctgcgatcctgcctgcagtgccgcaatcgaaggttcaaggccgatggatccggtaatgccgttcaacaccacgtcggcaccggatccggccatggcgattaccgcttccgacccggccatgatttccacatggcttgcgccggcttggtttagcgcatcttggagcgcatggaccgcgtttgtgttgaagatggcgactttcgaaacgtgaaattggaccgcctgttgggccagaagttccacgtgggagccgcctgccgcaagtccgaccacgttgaaacggtcgagatggcgggagatgacgtcaagtccttgggtgccgatggatccggtggatcccagaatgactacggttgaggtttgcatgggttatgcgtgtgctccgtatttgttttggattattcgtgtgaacgcgaaaacaggctgacggtcacgtcagcctgttcagtgcgattgcctactcaaaagaggggaacgacaggtcgggaatatcgacatccagattgctgttggatgcttcgaacatcggattggttgccggcttggtttcgttcttcttctcttcctctgccggtttcgccggttcaacgggagttgccgttgtcgagtgatctgcggaggtggctggttccagcgtgaaggagggtgggacggtcggcaaggttccgagattaatcgagtcggtattgacctgcggaaggttcggcgtcgacaggcttggcatgcgcggggtgaacgtgtcttcgaccggatcgggagcgtcgatgttctgggccatctgcgccaaggcagccaacgaagaatcgggagcgatggtgatgccgtgagattcttccggctgatgcgcgaccgaagtgtctggaatcacaggagccgcaggcgcggccggagcgtcatagctcggcgcgccatcatcagaaagcggattgaacgcttcggtttccgttcctgcggaagatggctcctcgtcaaccgcattggacgctttgaacaggtgtgccaacgactgttccggagccgctggagcaaccggagcggcctgaggttccggcgttacaggagctgccggagttaccggagccgacggggtgctgatggttggctggaacacaggcggaaccacgggagcatacgtcggcgcagcggtttgagtggccggaatgctcaccggggacgttgcaggcgtggtgaaaatctcacgttccgccttattcaaagcgtcgaaggagtcagtgctgttttgaacctgagcgggctgcgcaataggttctgcggaaacggctggaacggcgaataacggcgagaccacctgcgtctcttgggatgccagactggttgcggacggattggctgcggtcatcgcgctttcggagggctcgcccacgaagtcggccacacgagcataggattcgagtctggtcagcagctgcacgcattcgttcaggtaataatccacctgacgctcgtcatagccacgcttgcccttgcgctgggtgaagatcacattcgccacggtctgggagttcagatcgacaagtttcttggcatcgtcttccgacacttcctcaacgccgagctcgccagcggccttcgtcaggcactgatcgacgatgcgatccacttgcttgcggtcatagctcggctccttgccttctcctggcttgaaacgttcgccgtgctcacgtttggaatgggcgtcaagctggcggaacagactttcggtctgcgctttccacgccacacgaccatgctgcgaaatctcccatgtggtctgcttgtccaccacggcgcgctccaaacgagcaagggccgcgtccacttgggcgatcacatagccgcctttgaccaaatcgaaagaaacattctgaatatcatgctgggtgagttgcgctccctcaccttcgtacagcatgtgcgcacgctcaagaaaagcgtccacctgttcggaatcatacccccacttgcgctttgaagtacgagcgatccccgatgcgttcctctcggattcaggttcctgcgccattggctatcgacctcctactgcactactcaacgtccttactctacgtgattgattcgacgcttttggctttcttgtggaaaattcagcgaatcgacactcaaatcacaccatttttcacgcatttactatggaaggaacccctattgggcagcgcgacacacgttgaagctgtcgcaggcaacgaatactgtacagtagagctttgcgggcgattagctcagttggttagagcgccacctttacacggtggatgtcgggggttcgagtccctcatcgcccaccttttgtttccgcagaaaataagccgttccgactcttctgatattcccaactatctcgcgtgcacgtcagcaaagtcatgacttttgtcaatatagacaatttcatggaaacatcttcttcgactgcttccgcaagcaaaaaggcttggaatcatgtgattccaagcctttatatgagcgcccgaccttggccatgcgtgtcgaggcgggtaaaacgaatacgatcagcggcctttgccgaatgcgcgcagacggatgccgttccagtcaccgctgacggtcagcggcgtggctgcattcatgccggcggtcttcgcggcggactgcacggtgcttgaacttgccgcgcccgggcgccccggcttcggggtgagcacccacaatggaccatcgtcgccgaggaccgcatacgcatcgacgatggtgtcagacagttcgtcttcgtcatcgccgtcgcgccaccagataatcacgccatcaacggcggaatcatagtcctcgtcgaccagctcttcaccggtcagctcctcgatcttggcgcggatcgagtcgtccacatcatcgtcccacagccattcctgtaccaggtcgccggcgtggaaaccgaattcttcagcgttatcagatgccgtttgattcacgttcgtcaatataccaacactgctcgaacatatacgttacgaaccgtggaattgctcactttgcgagattgttttttcttatatctcggaatgcgtcactctcccgcggagcattgcggcagggatgcacccttgccgtctcggacggcaaccagcgcatcgtacgcctcctgcaaagtggacaccttcaccacgttcaaaccttccggaatatgatccacaacgctggaacaattggattccggggcaaggaaccaagttgctccgtcgcgtttcgctccgagcatcttcaaacggatgcctccgatttcaccgacttcacctttgtcgttcatcgtgcccgttcccgcgatgatcttacccccagaaagtttttcaccggtcaccttgtcgatcagaccaagcgtgtacatcatgcccgccgacggcccgccgatgtcgtccacatgcatggacaccttcatgccggacacgtcataaccatgctcttccaggaactttttcgccgctgcggtggcggaatcctgcgatgacgtcatctccttgtcgctggactgcttgtattcctctgcggtctgtccaacaggaaccaccgcttcctgaggcatcaccgtggatttcgaatcgacccacgccaccaatgcctgcgcgttcgacaccgggtaccctggcacgcctgaagcattgaccgtgaccaacagcagttggcctgaatccttatacgttttcgcaccggaaacggcgatgacctgcttgccggaaacctccccgagcacattctgcgtcgggccgggcacctgcaccacatacgcgctgggcataatcaacaccaatacgcacagtaccgccaccaacggtcctgcaagataacgccatgaacgcgcggacagccaaccttccgcgcctatcagccatcgtttgacacgtcccggagcgccgctacgtgtgtttttgccgtgaattcgtcgtgtttccttcatcttgggcatacctcccataacatagtatggaaccaaccaaacttgaaaaaacgcttaggaaaaggcagggccggcatggacgagaacgcgatccgccaatggtttatcgattgtttcggaccaattcaaggcgagatggcatggaaccagttttccaacatgccggaagagttgcgcgaccagttgatgagtcaggatgtgagcaagcttcccaagccggccgaggtcaggtcgatgatgcaggcgttcactgcgggcgggctcaacactttcggagacatccagcacatcaccgaggaaggtccaatcaacgtcaaactggcgaaatcattggcattgcagcaggccaatggcgaaggatcggaaaccagtgtgagcgcggagtacggcgagatggcccggcgagccatcagcgaggcgaatctgtggcttgacaccgcttgcgaattcaaccccgcgcaaggcgaaacgcaggtacttacccgcgcaggctgggtggaaggatgcatcgattcctgggcgcagtttgcatccccgattgccgagtcgatgagcgacgctctggcttcgattttgtcacagcgtttcggcgattccgaattccatacggaaatttccggcattttcgccggtccggtgcagattccgattcccgatgatatgaaagatccggcaaaactcatgcgtttcgtcggcaatacgtcgttcgccatgcagctgggacgtgccgccggcgatttgtcgcatgaggtgcgcggcagtttcgaccaaagcatttcgttgctgaagaatccggctggaggcctgatcgtgcagaatgtcgtcgaatatgcgaaatccttggaaatcgacgtgaacgaagcaatgagctatcttgcactgcaagagctcgcccattcgcgcctgtacgcttccgtgccgtggctgatgccacgcttcgaggcgctgttgggcaagtatgcccgtggcaccagcatcgatttggacgccatggaggagcagatccgcgatgcgcagtccgtcgacccggattccatggccgacgcggtgaacatcaccaaggtggcgttccctgacacgcctgaacaacagcaggccatgaaatcgctggagaatctgctcgccttggtagagggttgggtagacaccgtagtgtggcgcgccggcatggcccatattccgcatatcgaacagcttcgtgagatgctccgccgcgagcgcgccatcggaggtcccgcggaacgcaccttcgaaagcctgatcggcttgcaattacgcccgaagcgcatgcgtgaagcggccgcattgtgggataacatctgcgctacggaaggcgcgcaggcacgagacgcgaaatggtcacatcccgatctactgccgcaactgccgaatgatgacgatgacaacacctcacagtcgcagaacaacggatcgtcggaaaacacggaaaatacgacgttcgccgcttccaatgccaccgatatggcgtcgcagccccttggcgacgccgatggcatgaccatcgattgggatgccgaactcagcaagctgcttgacgaggaagagcacaagggcggcgaatccgataccaatggcagcgactctgacgattccgcagaatccggcagcaacaacgataccgacgccgagtaatcgcgctattccgttcgcagtatcagcggaagaagcgcgacacccgtcgtgccctttcaccctcattgccttcacgggtacgcgcatatgagacgtcaagcgtgtcttcggcgcgcgtcacggccacatacatgagccggcgttcctcctcaagcacgtcgtcatcctgcggcaacccatacggtatgagtccttccgagcagccgataaggaacacgtgcttgaattccaaacctttggacgcgtggatagtggaaatggtcacgccgctcagatccgcgccgacgcccaatgcctccaacatggccagtctggtctgcgtgtcgtcggaaagtgcggaattctgccatccgctatccctgcgcacgcgatatctcaaatgctgttcggccaatgccttgcacaggattttctgctgcgcgttgactctggtgagaatcgcgcaatcggccggcgactcccccgcatccaccagtttgcggatgcgcgccgccacaccttgcgcttcctcccaatcgctgccatatatggtttccacgaccctccgtcctttgctcctttcagagctgagcttcagataatcggcccgctgcggcgatgccgcaagcacacgattggcatagttgacgatctgcggcgtggaacggtagtcgttgttcagattgatgtcagcggtgagcggaccgaattccgaatcgaagttgagcagactgtagctacttgcgcccgcgaacgagtagatggtctgcgccggatcgcccaccacgcaaatattgcggtttgagccgagccatcgggtgagcagacggtgctgcaatggcgaaacgtcctggtactcgtcgacggtaagccatctgatgttggagcggatagctgaggccacttcctcgtcgctttccatcagatgacaaacgatcagcagaatatcgtcgaaatcgatttcgttgcggttggttttttctgcctcatacgctttgtatacgtctacgaattggcttggttcgaggcctgatggcggctgtcgatgcgttgccgcgcaaaccagcgcgtaatcttccggtgcgatcagtgagattttgcaccagttgatttccgcttgcaagttacgtatggtgtcgtcatccacttggaaggtggtgacgcggcgcagcgagcgctccaccagttcacgtggatttctggaaatgaacggcatcggcccctcgcatacgtccggccacacttggcgtagctgatggagggcagcggagtggaaggtggctgctttgacgtcggctgcgacatcgagtttcgataggcggctacgcatttccgccgccgctttgacggagaatgtgactgcgatcgtgcttcgtggattccacgctttggtggcgcacgcataggcgattctgcgggtaacggttcgcgtcttgcccgcgcccgcgcccgcgatgatgcgcactggaccgtccacggccgttgcggccgccctttgcgcctcatccaatccgtcaagaatctcttccgctgttgcactcatacgttccattgtggcagattgccgtcgccatgtgacgatttgcccgcggttcacctgcagttttactggcaagtcggcaacgcttcgcccttattgtgtattaaggttggaattgtgaccgaacgaagcaaatttatgatagctgccctgacgagtgcggcgatgccgaacgccgccattgcgggcgcgcgtgccagcgaacagaccaacccgaccgacgaggggtacggcgtcgaccatgccgtggttcaggatgcagcgggcaagctgtatgacgtgttcgcatccaacacgcctgaaggccgtaagcgtcttgccggtcgcgtgcgcgctgcgcagacgctctcgcaagcccgcgaattaggcggattgggttttgccgtcgatagcatagtagctttttcaaacggcgatttgaagcattccgccactggagatacgtccgtgctggtggccacccaccatgtgggtcaggcgcggccgttggagctgctgactttggatgattgttccagcgtaggcaccgctttgggcgcgattcatcgccttcgtcccgacttcctgcaggaagcgggctatccgacgtttgtcaccggccagattcgcgctcagctgaccgcttggatcaagcgcctgcgtcaggctggtcatgttccgcaggagatcaccactagttgggcgaatattcttgagaccgacggcctgtggtcgttctccacttgcccggtgcatggcgggttgcgtgacggcgatgtgcttttttccggttcgtccatcaccgcggtcacgaattggcaggatatgcaggtcaacgatcctgcccgcgatttggcttggattttcgccaagcttgacgagaaccaccgcaatgccttgctttccgcatacggtcgcatgttgggcaatcgtttggatgatctgattatgctgcgggccaatctgtggctgcagatggagcaggtcggcgattttatttccgctttgaacaaggcagacaacgccaagattatgcaattcaaggcgcaggtggaacgcctggcccaccagttgggtgtcgccacagcgaagaatcgcgtgcaaactgaaacgaagcaggagtccaaggatcgcccccagcgcccgccgagcacaatcaccgtaggcacgttgctgaacgaatcggagcgtcgccgtaacgcggccgcacagcagaatgattccgacacgaccggcgaacgtcatgttgacgctgtggatatggatgattccactggcgatttcgacgcgaccggcgatttcgacgtgaccggctcccagccggtccgcaagacgaaggaaatcgtcaacgacgcgacggaagcgttcgcaccggccggaacccagcaatcacaagcaccgtccggcaatacgaatgaacatgaggcgacctcggtcagcactttcattccggaacattccgcaaaagaacggcacgaatccatgccgtcaagttccaccatggtaatcagcaggctggaaacggccgacgacaacgacgatacgaacgaagaatcgattcccgcatcgcacagcgaggccgcgacagtactcattccactgttggagcgagatgaggcgaccatgcagaaagcgcaggcgcagatcaatcagtgggagacggaagacgccaccgatgagaagctacgcgtagaataggcgcacataacccgtacatacacgtgcgcatgcattgcgcattatcacgaaggagcatccatggatattgaactcggcattcagaatgtggcccgcaccgtcaccttcagcaccgaacagagcgccgatgaggtcaacgcggccatcgccgacgccgtggagaacggcaagaccatcaatctgacggacgacaagggtcgtcgcatcgtggtgccggcaggctcgctcggctacgccatcatcggttccgaaaccaagcacgccgtcggtttcggcaacctctgacccgttcgcatcaccagatttcagcttcgaactgaaacacacgttttcgacgtaacaagaaaagccagacgttcgcgcctggcttttccattttgggcgatcaactcgtttctggtttcatatctcaattacgcgtcgatgattgcgtttcggttttttattttcgccttcgacgattctttgctcaagcggacgcctcgattgatgatttcctgaactgtttcgtcgctggtgaggttctcccccagcgcgttcggcttgcctttaccgtgccaatcggatccgccagtcaccagcaggtcgtgccggcgcgcaatggtgagcagacgttcacgctgttctgatggattgccgcgatgccacacttccaaaccgtccaagccttcggtgatgagagattcgatttgccggtcggtcagtaatgtccgattgcgccgggggtctccggcgtgggcgataaccaccaccccgcccgcacccttgaccgcggccaccacgtcgtgcgtggtcggtgatggcgtgggaatataatatttcgacgttgcgctcaccgcatcggcgaaagcgtcggatcgtgtttcatatacgccggcagccaccaatgcgtcggcgatatgcggccgacctatcgtggtgcgtttgccttcacgcacctgcgcgagcacatcatcccacgtaatcggaaaatcctgcgccatcagttcgaccatgcgcttggttctacgcagtcgcgcctcgcgggtggacgcgaacatctcgctgatatcggcgttcagcggatcatattggaatgcgagcatgtgcacggatacgctctcatcgacggcagtgatttccgtaccgcgtaacaacggcaatctgacctcccgcgaagcagccaacgcatcctgccaaccggaggtcgtgtcatgatcggcaatcgcaacaccatgcaatcgcaatgctctcgcttcctgcaacaacgcacgcggcgtttccgtaccgtcggaaaaaacggtatggcagtgaatgtcccaaccttcagcgggcggtcccgcagtgcctacgcgaatcatgtatccatcgtaagctgtttttggcgcgactcggcacaataccgcgtaaactaggcgatgacaacgtttgtattttgattcaaggatgcacgatgagcgatttttccggcgaacaggttgccgaagccactctcgacgatgattatacgaagccgcgcggttggcggcataccgcgacatggacgtatctagtcatgctgatcgcctcggcggtagcgctggtcgtatcgttcgtgctttccgccgagacactgaaattggcgcgcaatcccggtcagaagctcagctgtgatgtgaatgccgtgatgtcgtgttccgcggttgcggaatcgtggcaggctgaggttgtgaagttcgccggtttgagtttcccgaatgcgttcttcggcatcgccgcggaatcagtgttcgtaacgatcgcggtgatcggtttgacgaaggtcgccgtgccccgctggtttgcgttgtgcacatggctgggtggattggccgcgctggcttattcgtattggctgacctcgcagtcgttgtttgtgatcaacgcgctatgcccgtggtgtctgtgcctgatgttctccaccaccgtgcagttcatggcgttgtctcatgccacggcggtggttcaggagattccggccaagcgcgagggcgtacgcacctactaccgtcttaattacgatctgatggtcgatgccttatggatcgtgacattgattgtgatcattctcgtcgaagacggccccctgctgttcagttgacgtcaagtaacgtccaatcagcagtagggattcactcgcctacaagagaagccgactggaaacagccggcttctttcttttgcgtatccgcaaatttcagtgttatgcgcaaaaccttacagcagttcgattttgccgacgatggtggccgatccagtgagtttcacgtcgttatcggtcacgtcgacgcgcagggtgccgccacgcacggtgatcgtccaatggtcgatgccggttttggcacgcaacgtgatggcggtggcgcacaggccggttccgcacgacagggtttcgccgcagccgcgttcgttgacgcgcatggtggcgttgccctcgttgtcgccttcgctttgctcgtcgatgcgcacgaactcaacattctggtcgctttcgattcggggcgcgaccaccggcttggtcaccaaatcaagctgttccaccgtcggcaggctggagaacgcgtcttcgatgacggcgaccacgtgcggattgcccatgtccacgaacgtgccgcgtgcggaaccggccgtgccgggaatcgtcacttcgtatccatcaagatcgccacacttccatgaacccatctcaacctggaacacgtccttgccaagagtcggcacatcgccaagtgaagtcagaaccttcacaccggcacgggtgccgagacggaacggttcaccgcccggctgaccggcaataccctgccgttgcgcgaacagggtgatcgcacgcgtgccgttgccgcacatctcagccaacgagccgtccgcgttgcggtagtccatgaaccaatccgcattgtcaacagcacaaacggcaatctgcttgtcgttcaaatcggacaccgcctgcggatgtgtaaggcggatcaaaccgtcgccaccgataccgaaatgacggtcgcacaggaatcgcacttcatcggcggtaggctcgtacgtgccttcggcgtctagatacaccacgaaatcgttgccggtggcgtgtgctttgtaaacaatgcttggaatgctcataccgattcactctacacgcggtaggctattgaagaagttggacacaacacgtgtgcgttatgttgcagtatgtttgcgtgcggaacaagggaggacgtatgacttcaacggcaccaatcggcgttttcgattccggtttgggcgggatttccgtggcgcgcgaaatccgccgcgatatgccgaacgaacgcgtgctgtattttggcgattccgcgaacgctccgtacggaaccaaatcacctgaacaggtacgcaagctgtccgacgccattgtgaaacgtttcgtggagcagggagtgaaagcggttgtcatcgcttgcaataccgccacttccgccgcagccaacgagttgcgcgacaaatacgacattccgatcattggcatggaaccagcgctgaaggtggcgtgcgatcgaggccatggcaatcgtcagcgtgtcatcgtcgcagctactcccctgacgttgcgggaacgcaagttcgccgtgctgatggatcgtttcaaaacagaccatacgatctttccggaaccctgccccggtttggtggagatcgttgagcacggccaactcgacgatcacgatgttgtgatgcacacgctgcaccagtatttcgaccagtatgatttgtcgacgatcgattcggtagtgcttggctgcacgcatttcgtgttttaccgcgactatttccgcgaactgctgcccgatacagcggcaatcatcgacggcaacgaaggtaccgtgcgccatcttggcgtggtgcttgaatcgttgggcaagctctctccggaagacgcggacggtggtatcgagctggccaattccgacacttccgcgcaaatcgcgcaattagcgcaatcgctgcttgagcgctgagcgcgaatgttccgatagaccgcgtaaagtcgattaaaacccgaaaaaactgctcaaccgttatcagacgtacaacgacgaagtggcgctggccaaggaatacgagcaggacggccgcgtgctcatcctcgcgccggaaagcctgtacggcctgaacacgttgagcaagtcgttcgaaggtttggaacgcatgtaccgcgcgggctatgcggcggccgaggccatccccgcattcctagaaagctgaagataacgtccatatccaacgcctgccagcggttcgttttcaaattgagacatgacacgaaaattttataaaactcccatattatgtcctattgttttttcgtcgacataatcggcggaaaagtcgacattaaaggagaatgaaatgaagaacaacacattccgtcgcctgctggccatggccgcggcgggtgccatgctgacgtcgatcgccgcatgcggctcgtcgtccggcgatgacacagcctccaacggttccgatagcacctcgctgatttcagtgaacaacagcgaaccgcagaacggtctaattccaagcgacaccaatgaaatgggcggcggcaaagttattcgatacctgttcgaaggtctggtgagcttcgatgcaaaaggcaagcaacatctcgaagtcgccgagagtatcaccccgaacgaggatgccaccaagtacacgatcaagttgaaggaaggctggaagttcaccaacggcgaggcggtaaccgcccattccttcgccgacacctggagtttcgccgccaatgtgaagaacgcgcagaagaccgcaagccgattctccaccatcaagggctatgacgagctgcaggatccgaacgtcgatccgaaggccacactttccggtctttccaccccggacgactacacgctggtcgtcgagctgaacaagcctgattccgtattcccgaccaagctcgcgcaccaatccatgttcccgctgccaagcgtggcatttaaggacatcaagaagttcggtcaggctccgattggcaatggtccgtacaagttcaagtcctggtcccacgacaagaacatcatcatcgtaccaaacaaggattataagggcagtcgcaaggtatccaacaaaggcatcgaataccgcgtctatacgaatgaggattccgcttactccgacgtgctgtccggcaacctcgacgtgatggatcagattccacagtccgcggtgaagaccttccgtcaggattccggcgtgatcgcctacagccaggcaggatcctcattccagtccttcgtcattccggaacgtcttgagcatttcggcaacgacgaagaaggccagttgcgtcgtcaggccatttccatggccatcaaccgcgatcagatcgtcaagaaggtttacaacaacacgaagaccccgaccaccgatttcacttcaccgctcgtccccgaatatgtgaaggaactggagcagaacggcggcaacctgaaatacaacgcttccaaggccaaggaactctggaagaaagccaatgccatcaagccatggtccggcaacttccgaatcgcctataatgccgatggcggccataaggaatgggtcgatgccgtgtgcaaccagatcaagaacacgctcgacatcgacgccgctggcgagccgtacgccacgttcagcgacgtgcgtaaccaggtgaccaaccgcaccatcaaaaccgcgttccgtgctggctggatgctggattacccgtccgctgaagattatctcaatccgctatatgcctccagctccgctgacggtcatggttcgaacgatggtgattacaagagcgcggaattcgacgagctcctgaacgctgcacttgcccagaccgacgtaaagaagcgaaccgaggacttcaccaaggcgcaggaagtgctggccaaggatcttccggtgattccgctgtggaacgacaacgtcgccgccgcgtccgcgacgaacgtgaagaacgtatcgttcgattacaccaatctgcctacctacaacaccatcactaagtgatgtttccggccggtggacgaacgattcgccggccatatagggagctcaagtacagtggggttcgaatccttcatggattcgaaccccactgtacttttgtggcctgttttgccggtttgccactacagcatcaactctgcacgtagctgcccttcggagacttccaaccgcagttcatcatctcgctattgaacaccattgcgccttcaccatgagccggaacgacgatcataccgccatcgccatgatgacgggcgacaccatccagcgccgccttcgcggcctcgattggctcctccttggcgtacagaacacgatcggaaacctgatgcgcagcgacttccttgacgaacgcctcaccgatgccggtgcaggagatcgcgacggaatcgttgttggcataggtaccacagcccggcagaggcgaatcgccgacacgtcccggcatctggttggtgatgccaccggtggaggtgccggcagcgatgttgccggacgagtcacgggcgacagcgccgatggtgccatgcttctcccactcgtcgccgttggattgcgcctcgcgcaaggattcctgacgtgccggagtgatgaaataatcactgtcgcacagttcgattccccactccttaagcaaatcattaccaggcttggcaaacatgacatgcttagtcttttccttgatggcacgcgctacgttgatcggattcttagacgtggtcagaccacatgcggaaccaacctcgccatcgataccggtcatcaggcaggaatccatggatacgatgccttcgcttgtcagcgcagcaccacggccagcgttgaactccggagcatcctccatgacacggatagccgcgcacacggcatcctccgccggagccccctgctccagcaacgcatagccagcttcaagagccctgttcaaatcctgctccacctgggcacgacgttctggcgtatcctttttgccacgattgccggcacccgcgtgaatcaccagcagaatcccgtccggatcagcttgggcgatatggaccgtcgactgaggcagtgcagcttcgttcattgatatcttctccactccatttttattgattattcgcagacattttacgtcgtccttcgctaagaaatgaccgaatacgcaaaaatacgtcaattagaccgcgtaaagtcaattgaaacccgcaaaggacggacgacgaaaggacggggcgcatatggctcatagaacggcaatgatcgacgtcggcggcggtttccgtgcgatctacggtgcgggcgtgatggaccgcatgcttgaggacggcatcagcgtcgaccattgctacggcgtttccgccggcagcgccaacatggtctcgttcatcgcgaagcagcacgggcgcaaccacacgttctacacgcagtacgcgttccgcaaggaatacgcgagcttcgacagctacgtcaagaaccataatttcgccaacctcgactacgtgtatagcacgctcagcaatcatgatggtgaaaatccggttgactacgcggctttcgaagccaacccgaccgatttcaccgtggttgcgtgcaacgccgaagacggctccacgaagtatttcagcaagtccgacgtgggctacgacaatttcgacatcctgaaggcgtcatcagcggtgccggtggcttgcgaaccgtatgagatcgatggcgtcccctattacgacggcggcatcgccgatccgattccggtgcagaaggccatcgatgacggctacgaccgtatcgtggtgatactcacccgcccgaaagacaccgtacgcgaacagaagagggacatcggcccggccaggattttgaagcgcagccaccccgaagccgcggaaaaactgctcaaccgttatcagacgtacaacgacgaagtggcgctggccaaggaatacgagcaggacggccgcgtgctcatcctcgcgccggaaagcctgtacggcctgaacacgttgagcaagtcgttcgaaggtttggaacgcatgtaccgcgcgggctatgcggcggccgaggccatccacgcattcctaaaaagctgagcactaccctcatatgaacactccagccgatagcaacacgcgcgaaaacgccaacacgaacaccgacatcagcatcaccgcgaatgccacgggattcagcacgaaaacactgaacccgcagattctcgtgaccttgtggaatgtggaacgtttgggttcgttctccgcggtcgcgcgcgaaaccggctggtcgcaaccggccatcagccaacagatccgcaaggtcgaacgcgaacttgacgcaaaactcgtgcagcgcacgtcgcatggcgtggaattgactccgatcggccatattctggcacgccacgggcagctcatcgacaatcgcgtcacccaagccgtcaaagatgtggaagagtaccagcgcaacggatcgacgcatattcgtttggtcgctcccccatcggtatgttcgtcgttcgtggcacgcgtgctcgtgcatatcagcaaaacgtccgacattcgcgtgagcctcatgcagatggagccgcctgaggccatggaggcgttggaacaggggcttgccgattgcgcgatcatcttccaatacaattcactccccgctttggccggaccggacgatttggaagtcgctcctttcggtgtcgatccgctgatgctgctgatcggcgcgaacaatgcgatcgcgcgccagtacgaaagctcgcacctgccggtccaattggtttcggcacgcagcgaacagtggatcgccggctgcgaaacctgccaggcgaatctggtgtcgttggcgcgtgccgccggcttcacaccggaaatcacacattcgaccgacgatttttgggccacgcagaatctggtggaagtcggcatgggcgtctcgatcatatctcgcttagccacaaccgctggaatccaacccgatttggccgcactgccaatcgccgacaacaacgcattccgcacagtctgtttcgtcacaagaaaagtggacgaccgaccggcagtggcccgcgtcaaagacgaaatcgaaagggcgtcacaccagtatttggaaaacatctgattcatcgtttgatatccgtgcttattcgcaatcgcggaatactgcagcaaacaattgtttccagtattttgctatatcgtcataatcagattaataattgaatagcaaaagcatctgatataagaaaacttcataacagtctttgctttcagtacaagaacacactgttcgtgcaagcatcggtacgtcatgctggaaccatggaagaaatcatggaaatgaagcatcgtaccggttccggctttgacgccgacgccatcgaccacaccaccgcagccgatcttgccgcagtcggctccgacaagtggacacgctaccccggctgcatcggcgcgttcatcgccgaaatggactacggcctggctccctgcatccaagaagccatcgacaacgcctgcgaccattgcaaactcggctacattcccgaaccctggaaacagcgcgtggcagcagcatgcgcaggatggcaacgctcgcattacggatgggatatcgatccgagcattattcgcgtggttcccgacgtactcgaagcttatgagattttcctgcgtgaactggtcggtgcgggcaacagcgtgatcgtgccgacgcctgcctacatgccgtttttgagcgttccgaaactgtacgacgttgacgtgatcgaaatcgaaatgctgcaaagcggcgacgccgaaaccggagaggcgcaatgggtgttcgacttcgacgccatcgaacgcgcgtttgcggccggatgccatgcgttcgtgctctgcaacccgcacaacccgatcggcaaagtgctcaccttggaggaggagctgcgtctgagcgatcttgcggcacagtatgacgtgcgtattttcaatgatgagattcatgcgccgttcgtgtttgagggcaagcacattccgttccccaccatcagcgagcaggccgcattacagtcgatgaccgctaccagcgcgtcgaaatcgttcaatattccgggcacgaagtgcgcgcaggtgctgcttaccaatcctgcggatcgtgacatgtgggcggtcaaggcggagtggagcgaacatcagaccgccaccatcggcgcaatcgccaccaccaccgcatataacgaaggcgacctgtggttccaggatgcgtttgcctatgtgcgcaggaatttggcgttgttcgacgagcagatgcgtgaaaggttcgccggcgtcggctatatcaaaccgcagggcacatatatcgcatggcttgatttctcgccgcttggcatcgacgatccggccgcatactttcttgagaaggcgcaagtggcgttgaccgacgggcgttcatgcggcgagaccggtgccggatgcgtgcgcgtgaacatagcaatgccgtatccgctgctggtcgaatgcctggaccgcatgtatggcgcgttgcatgcggatggattgctgtaaacttcgccacatattcagtgttttcctcaaccaacggcagcataacggtgaacgtcgtgcccttccccacttcgctgtccaccgttatggtgccgctggaaaactgcatactatcgacatgcgatgggaggttgatatgcgtttgaacgcgagtaccagcattgagacggccgcccgcgaaaaggccggcgataatctgctgttcttgggatttcatggattcagcaatgatgaaaatgagatgatccgcattattgatgcgatttatgatgttccgaagcaagacgcatcttcaacggacaactccattgctcctgcccagcatccgaattatctgtcgttccgaggcacgtacgaacgtccttacatcggaagctactactggtatccagatggatgttccgtagaagagcgtcgacgtgagtgcagtgccgtaggcgacgccgtcgtacgattgctggattcgcccgcatacgcgcatttccgcaaggtactgatcgggttttcgcagggcggatacctgtcgtatcgcatggttgcggaacatcccgatgcgttcgacagggcgattctgatgagcccatcattcaaaggcgaaaccgctgagcctttgcccgcgaccggacgcacgcgattcgcactctgctacggcagcgaagaccgcacaattcctttagccgaccaacagtgcgcgcacaacaaacttgcgcaaaccggcaatctcacgtatttcgaatatccgggaatgggccacggcatctgcgatcaggaaattcgtgacctacgcgcctggctgggattgtgatatgcgctgcgtgaggagttctgcgcatctgagactccgcacgcgtgcccataaactcgctttcaccccctcggattgtcattgaaaccaactcggaactcttgatacaccctaatcgtcgaaatttatggacatacacccagttcatctgaactgaaccgcgatatctggcttatatatggcagatttggcatcttgacctgaagtttctcgcttatatatggcacatgcccttcgagaaaagccacttagggggcatgtttttgacacttttcgcacgaacacctgccatatataagcgagaagcctccgtacgaacctcaaaatctgccatatataggcgagataggcggcataattaagcattttccctcactgatgagccgcagaacaaaccagacgaccgaagttttacgatgttatgtacgtcaagctcaccacgaacatctctccacatatgtcgcaacaatatggtcagcgatcgcccttttccaatgctcgggcggccactgcatgatggtcgtaaagtcaagcttatgcgggttggattgtcagcctgccgccgagagcgtgcacgatcccttcataatggtatggaagctcgggttgacattcctgtcgaggctcttgtaaaggctttcacgtcccacacccgactccttcgtgatctgccccatacccttcgctttggtcatatcgccgattacggcctgccgcaacgccgaatcgtcaagctcggccaccgataaagcagcaacatgagcgagtcgctcttctgcgcggagcaaacacggtagccgggaccgaaattgaacctcagcgcgctggccccgtcaccaaccgtatgcaggtcacccaccggccgccccatctagaagcgcaatcggagtctcgcgctgattcgggcttttgcgttccggtcctttatccggctgaaccattggcgatattcgccagtcatatgtatttccatatgacatgttgcatcccatgggacacaatatgtctagcttgacgaccactcacgagatgaacgaccaaagtaaaacagaaattcgacaggttagccaatttctcgtgcatccgcacccacccgaccgttttcacatacactatttcttttacatagctttcagaagcgaccccatgcgaaacacccagtcgcagttcctgctcgtattaccgttgaagtcgccccgagcggacaaaaaccctggttttccgttgctagcagtcccgcacatgtggaatcccgcatgtgcggggaacactggacataaacagggagagcaacatccacgcggcggccagaacgatgcagacaccgatttcaatccacgctctccatgaggagagcgactctgcgcggtcacgtcgatcgtgtcgtacagccaatttcaatccacgctctccatgaggagagcgaccggtgccatctcgtcgggtttggcccaacgcgcgatttcaatccacgctctccatgaggagagcgacctctgctcgtatccatcgccctctgctgttgcgatttcaatccacgctctccatgaggagagcgaccgggtccacacgacgttcgactcgaaggtcttgtcgttatttcaatccacgctctccatgaggagagcgaccttgcggttctccaaagatcgcatacttgtaaatttcaatccacgctctccatgaggagagcgacctcgtcgtcaatccgaacggcaccatccgatgcgcatttcaatccacgctctccatgaggagagcgacttcgacagtttttactctacgcaaattcgtagattatttcaatccacgctctccatgaggagagcgacaaaaccacgaccgacagtgcgcattcccgattgatttcaatccacgctctccatgaggagagcgacccatcattgcctgacaggctcacccactggggggaatttcaatccacgctctccatgaggagagcgaccggcaactcgcaaaacaccgtagcagccattgtaaatttcaatccacgctctccatgaggagagcgactcggacgcgctgcacttcggttttggtgaagttatttcaatccacgctctccatgaggagagcgaccggcaactcgcaaaacaccgtagcagccattgtaaatttcaatccacgctctccatgaggagagcgacaacgtaggcgttgcccaactgtatgtcgtgttgatttcaatccacgctctccatgaggagagcgacccatcattactgccaaaggttaagcaatagccgataatttcaatccactctctccatgaggagagcgacctgggcgtacgtttccgaaccttgcgtattggggtatttcaatccacgctctccatgaggagagcgacccgacgactacgccagcctgcaacgcatcatccgacatttcaatccacgctctccatgaggagagcgaccttggaggattgccatgagcctgcttgacgacatatttcaatccacgctctccatgaggagagcgacttgccagcattccaaagccatgtgccggcaccggcatttcaatccacgctctccatgaggagagcgacaggacaccaatgtgcggccggctgactggtcgacatttcaatccacgctctccatgaggagagcgacaggccgcacgccggtacgctctggcgcaagccgcttatttcaatccacgctctccatgaggagagcgactaggcgtggaagcggtgccgtgggcgtggacatgatttcaatccacgctctccatgaggagagcgacgatattcatatggatgcggctcttgcgttctgtatatttcaatccacgctctccatgaggagagcgaccacatacatactatcagcatcgccgcgcgtcagaatttcaatccacgctctccatgaggagagcgacttgcgcagattccggtatcggtcggggatgttatttcaatccacgctctccatgaggagagcgactcggggtcggcgtccacgggtatgccgaagtcatttcaatccacgctctccatgaggagagcgaccacggcactggccgcattgcgcaacgcctacgcatttcaatccacgctctccatgaggagagcgaccaatgaccaccatcaccatcaccgggaaacaaccggatttcaatccacgctctccatgaggagagcgactcgtggacgttcccatgcccggtacatggcaccgtatttcaatccacgctctccatgaggagagcgactcatcagcacgaagcagacgaccgcgagcacgatatttcaatccacgctctccatgaggagagcgacgcgcggggctcttcgaactcatcagctggctgatatttcaatccacgctctccatgaggagagcgaccgaagaagatagcgacatgccattgcattgcgatatttcaatccacgctctccatgaggagagcgacatactcgtatggcattatcattgctaccaccgtatttcaatccacgctctccatgaggagagcgaccactgacatcgttacgattccatgctgtgtgaccgtatttcaatccacgctctccatgaggagagcgacgcacagcatattgaccgcacggcaacatgattcaatttcaatccacgctctccatgaggagagcgaccgaaaccaacaaactcaccgcccaaaacctcatatttcaatccacgctctccatgaggagagcgacaagatggcgagagcacccaaagtgggtgctctctatatttcaatccacgctctccatgaggagagcgacacaagtcaaagccgattttggcttgatcattggaatttcaatccacgctctccatgaggagagcgactgcacctgttcagcgtcaaattcaacgacgccggaatttcaatccacgctctccatgaggagagcgacgtattggggggccaccggtggagttgaggcactgatttcaatccacgctctccatgaggagagcgactgttcaccgacatcaactaccagctgtcgccggagatttcaatccacgctctccatgaggagagcgacttcatcgcatgcgacgagacccgccagtggggcgtatttcaatccacgctctccatgaggagagcgaccggagcttgcgcagaccaacaaaaccgatattgccatttcaatccacgctctccatgaggagagcgacgcagacccatgtctttgccgttgatgcgcagcgatttcaatccacgctctccatgaggagagcgacgtagtttcctccagcttgttcaggtcgcattggaatttcaatccacgctctccatgaggagagcgactctcaacggcatggccggtatcatcggtggaggactatttcaatccacgctctccatgaggagagcgacaggtggcctcgggcgtcaatgtcttgccgtccacatttcaatccacgctctccatgaggagagcgacgcagatattaaaaaaccgccgttccgataatggatttcaatccacgctctccatgaggagagcgacccataatgagccgatgcttggctcgactggttagcatttcaatccacgctctccatgaggagagcgactgcaaatcttctgacgtgtcaccgtttgtcactatttcaatccacgctctccatgaggagagcgactccgaccgtattgagctgtgccatttgattgttatttcaatccacgctctccatgaggagagcgactttcccacattttgtgtccaaaggggtaacgacgaaatttcaatccacgctctccatgaggagagcgactccatgactcgcggataatcaagtccgcgctcgatttcaatccacgctctccatgaggagagcgacaggccgacccgccacacaccccgccacacggtgtacatttcaatccacgctctccatgaggagagcgacacaaggataaccgtgtattgctaactacaatccccatttcaatccacgctctccatgaggagagcgacatggccgcgctccacataggcgttacccaattatttcaatccacgctctccatgaggagagcgaccaatgtttccaccaaaattatatcatgcgacgggaatttcaatccacgctctccatgaggagagcgactcggaaaacccacactgccgacaacggttacaagtatttcaatccacgctctccatgaggagagcgacgcgtatgcagtttccgtcaacgcagtacaacgcgttatttcaatccacgctctccatgaggagagcgacccgtcgctcggcaccgcgtcaagatgcaccttgtaatttcaatccacgctctccatgaggagagcgactcgacgcgcaccgcgccgacgcatacaatcgaatttcaatccacgctctccatgaggagagcgacagtgcagctggacatttttgtccgctttttgagacgcaagccagctgcctagctttaagcatatcaaacaacaccgccgatacgacgaacaacatgtctaaaacgagcaactggctttctgtctcattttaatgtccattatttagttttcaaaacgccccacgaaaatcacaattcggatttcgatagtttttcaggtgcgaaagacgtcccttatcatgagcgcttacacttcgcacaaacaccgttccaagaccggccaccttgccgaaaacacaatactgctggctagaaaacacactctgaataccggacggcacactcaaacgctcaacccagcataccccacaccatatcgttatggcaccatgccattttgcctgtgctatatcatcatcacatcattaaccggcaaactccgttcacgtccataatgctcaatcctatccgcatatcgagcgccaagtttataaaagcgcaggctgtcctcatcggtattggcaatcttcagcaaatcgtgcaccaacaccagataatcggaaggactcaccgagcattcgaaaacactgttctgcacacgctgtccgtatttcacgcatgtcttcgccaccaaacgaagacgacgcttcccctcaggggtttccgtactcacatcgtacgcaaccacaaccatcatggtttttcacctccaataacgtatcaccacgaatcatcgcataccgccacacacagctacgcaccttttacttccacataaatggcgggtaatcatcaagatcaccccgcaacgatcgagctagcagcagcgcttgcacatacggaaccaacccccatgaaattttttcttgcaggaacggatgaagaatctgatcgctcttctttttctgccacgccgtaagcactttcttccgcccggaatcagacagcagcacaccaccattctcccgtatttcaaaatcccccggcttaacagcgcctgtattaaccaatgtcagcacaaagcggtcagccaacaccgggcgaaactcttcaaccagatccaatgccagagaggctctcccgggccgatccgtatgcataaaaccaacatacggatccagccccacgccttgcaaagccgcaatgcaatcattcgtcaatatggagtagcaaaaagacaacaatgcatttagtctgtccagcggaggcctcctcgacctattggtgaaaaagaaatcatctttattcttcaggaccaaatcgtcaaaagcgtagaaataatctttggcagcaagcccttcgacacccctcaactcatcaaccgtcaaacttttccgagcttctaacaatgccgccgacaatttgccgctctgctcggcaagtcggtcaatatttacccgcaaagcatgatcacgtttcgtacgttcgagcacccatttcgcattgtaaagttttccaacaatgaaagatttcgcgtaacacaaagatttttgttcgtcatccgcgactcgaaattgttcacggcgaagtagcacattacgattctcctcccctaacacggaacagtaataatggcctctcggtgaatagaatgccatagaaacgcccagtttgccgcagcgccccataagagcaggcgaagcacccttatacgagaaacacatgattccctcaattgaccgtaacggcactttcgccaaggttttgtcattctgatgaatcacaacattgtcgttctccaaagcaagataggcatcttccgtcatcacaaacagcgtgtttaacagctgcttcatcactccccgctttccttgagccgttcttcgatatatgcttttgccgatttcaccttccgtaattcaggcaggcacaaatcccgtagagaacatgacgaacacgatctggtctgtttcactttaggagtccatccgcgggagaaaagatcatgcatttgcaagaagtcagcttcgaccatgttgcgaagatcttcgtccaattttacccgctcacgacgttttgtctgccgatagaacaaagcaccttcaggaatatcacacgcgagcatttcttccaagcacatcgcttccgcgcatagctgtaaacgatcagcatcaatcgttttggatttgccgtgtttgtattcaatcggatatggcaaccacaatccatctcttccgtgaagcggaacaccatcattagacttatggaattccacaacatcacaggctccagttatgccgagcgctcgcgaatagactctcaaatcccgcatgatcagcgtatcgccgcgagattcagaagccgcataatcgtgggcgcgttcatgttccagatgcccagctgtggtcaaataattctctgaccacagctgttcgatatggataagagcccactgtcgtttgcagaatgagaaatgctggatgcccgaaagggccagccaatcttcttccggatatccttctggtcctttcatacaacaccccttactctctcaattccaaacgcttcagcgtccttcaatcacttcgtaccgcaagtcgggaatagaagatccattcactgtcaccgttccgtccacattaacggaaacggaacgatgaactttggcggaagagtattgccctgacttgctgttgtgcgtgaaccacacaacgtccaacacttccatggaccccgcaggacgagccgaactttcatcattctcaaacaacgtgacgagagcttccttgattttttcggcgtcttctgcagtaaacccggttttttcggcaagctgtgggctgatgctgccatacgtcgcatacaccgcacggccggaaacacggtatttcattcccatggtatcggaggatttcttaccggtgtccgtggtttcactgttcactgacttagtgatctgcacgtcgtcaatggcgatgggttcaaccgagaacgcagcctgaatggaaaccggaccgcgcacgcccaaggaaacttcgtcaacatccttagcttttttgaatgcgaatacttgtccgaacgcacgtacgtcaagccactgttcgcacactttctggaacaccaggttcttctgtttctgctcttctttcggcaaggttttcaaatatgtgttgaaacggtccgacaatgattttgcgccgtcatcggaacggtcatcggactgcacgaaaatcgtttcaccagcatcttgcaggcgattgcgaatcttccttttcagtgcaacgtcagaaacctcgcccagcccttccgatgtggttcgtggacgattgccattcaacggatcaccattaggattggcattattagacgcaaaaacgactgcgaaatcaatcttgttttccaaagctgccatgatatgactccttaactttttctttgataatcaacgtcgataacttcaaaaactaaacactagttttctttgctcttctgggatgcttcttgcgctttatgcatagactcccttcgctggcatgaataaccgagcagaaagagcggtgaaagtgcacggttatcttcgaagtctccttctttgaaaagcgccatgacctcatccacgctgttctggaaccagggcgcgccattcgccgatttcaggtagggcatcagttgcttccacagcgttccccatgttgtaaacggctttgcgacgaaattgctcatgagcttaacggcattggtcggacgggtgtcactgattccttgcttatacaggacaccgttttcaaagcggtccgcgagtgccagcaatctcccgtataagtaatcgcggtcatttcgtgttggttcaaggtacatggatatcgtgtcctcctgtttgttttgcttcctcgcgtcgtcaatgtaatgttttttccataggctgcatgcgatttcaaaatctcttagccatgctcctggagcgtcatatcccataggtttagtgactctgtggtatgtggcgtccaatatgaagcggggaagcgattctcctccgaacatgcattctataagctgctttttcgtgtttttcgcaaaacgtttataggctttgctgcttctgtctgacacgtcatatgcgcagctgatgatgtcggcaaatggtggcgcaccttcatatgcgacaaacttctttttttctttgtcgtacattttcaacggccatgccgcatcaacatgccaccgcaggatactttcgacatattcgtcttttgaaagttcacgataatatgtaacgctcaaacgccctgatgtcgccgcatccagaatgacaatcatcattgggtcggcatgctttttgagtttgttagcattgccatatccgcgtagtaccttcgaaaaaacttgtgcgtattgaaagtttgttgcggtcagcgcatctgcaatatcgttgcggggagcttccggctcgtccacatccgatgagaacaaagagccaaaatcataagaaccttcctgagggtcaagcttcggcttttcgttggggtttttcaccgagcagatgactatggcctgggtatcggtaatcgttccatgattattgaccaaccattgcagcgtcgaatgtatcttctgcgatgtttcaccatcgacttgcaaagcctcctctttggatgcgaagcgccctcgataggtgaaattcgttgaatcgtttgccgataacagtttggcgttgccatttacgctgacaattttcttagggaagttcaatatcggagcatataggtcctctccgaacatatccttcccttttttctgtcgatcatggtacaaataagaaatccattgcgcctgtatatcgggatcgttcgagacatctgagttttgcagcccaatttcaacttcgaagcaaacacctgctttccggtctttttcggttatttccacattgaatcgagcggcttcttcgctgatgctgtgttccgagacgcatcgatagatggcattgagtttgacgttgtcgcctttccaagcggcaagctgctccaaatacatggaggttttctccttgtcgaaatgcaagtcgagatattggagctgatcaaacagaggatgcggtaccggcttgatggtgcgtcccatggaactttctgtgcacgggataacaatcgtttgtttttccctcagaagccgtagtatctcaccattctcgtttacccctagcgtcaatagtgtcggaagtgtcgtatgccccggaggaatcaaggctttcctaatgtcaagcgtagaaccgtcgccacttctcggaatttttccggcggcgttgtgcacagattcgttgataagcaacagattgttcgacaggctcatcactcactcctctcccaccggctgcagattgctccccaaagcgaattccttgacgctctggtttttcctgataattcgtccatccaatttcgtggattccggacgctcaaattcgatgatgccgtcggacataacaggcgaccagaatcgggcgataaaatcgtggtcctcgttttcatccggatacgtgaatccatggaacatgtatcccatattccactcgccataaccgtcataaaacccttcgccagatccgaactcacatggttccacatacccctggcactcgcgcgtccccaagaatacgtctcggcgaccgcctttctgaacggatctcaaggcgatattatgatgtttgttttcgtcgcggtcagcgacaagatcttcacgctgatcattccattcgaaatgagccaaaacctgataacgcacgtctttgagatacgtgtagtacgaaagatcattgccaccgctcattttgatgggtcgaattccctttccttcagtctgaactctgttcatcacacgaacagcgtcaataacccacataaaagttggcttccaatagatgctttccgtaatgcctttcaaagcttggtacgttggcacctgatacgaaaatttctcacccccaacacgtgttgctgcttccgagaacaacgcatatctgcctgatacctcatattcaattgagttgcgatgtcgttgcatataactccttcgttaatcgttccctcaaccagccactgtcaatatagcacattttacgcttattgtacatagaactctttgagtgtttctcaatcaacaatcaaccagttattcttgtataagtaggttttcctactgtcgccacattcatggcgtggattgaaaatatgtacaacatgcgtatttaccaaacgaaactctcctgcagattcccatcgacctgcaggagaaccactgccctttcatatcatcaacagagacatgtccgtctctgtcaccacgccatattcgcctttgtaataatctccattcagaacgcaaatatcgaaatcctcgctagcgatggaaatcgcatgtttttcgttcaaaatcttgtattcgtaatcgaaaagggaaaccgtgtattcctgtagccgccgcagaatcgcaatcttctccctcaactcaccgtggcccaacatatccagtaattccatcgcattgccatagggaaccacaacattgtgcgtgattttcggaatcacacgatattcattgccgaccgttttgaacgcctgggcaaaaaacggattgtatctctcccccatcgtattgttctcgaattgcttacgttggctttcgttgtatgccagcaactcataaatcgtttttccagcgttttcctttttccaaagcggaccatccagcaaactattgccgccatctcgatcctcactttgaagcagcatgccataaaactcattgagcatgccagtagaaagcagatcagcatcaggatgctcacccataatctgcaaagtgagctttttgcctctgtgaatctctggaagatagtccttgaacctttcctcaccttgcaacggatagacatacacatccttgatttctttcgattcaccattcctgttgcacctgccagccgcttgcataatgctatccagaccagccatcgccctgactacgcatgcgaacgaaaggtccactcccgcttcgataagctgcgtgcttacgcaaatcaccggcttggaatcatgaggatcagttaacacctttattctcgctaactggtctgccctatgtttgccacacatggcagtactcaaatgaatcaactcaaactgcccgtcagcattgagctcttgcaaacactgatacattttgcgcgcttcactcttcgtgttgacgatagacagacaattgccgttccgaagtgcctgctcatatatgatgttcgcaagttcctcgcaactcttgctttcctgtgaagcaataatccgggtacgcttgagcttctcttcgtaaccatcagtattgtcgataagatcaggctcgtctgacagacgcagattctttcgcgccgttcgttccaataaaggctgcgtagctgagcacagcagaatagtcgagtccaatatcgtcgaaagaaaactcacaacttcattaaacggattgatgatattcaatggaagcgactgaatctcatcaaaaatgatgacgctattggccatgttgtggaatttacgaagtttcgtaccacgcgccgacataaccgtttccaagaattcgaccatcgtagtcacgatgatcggattatcccaacgttcagatgccagtttacgttgacgttccttcgcatcctcttcctcacttgtgccgatagagcccgtgttaccggaattctgaaggcccgcggtggagtaatgctccagcacaatattgctgtcagcatccagaccaagcatattccggaatgttgccacggtctgtgacgtaatagacaagtacggaatcacataaatgattcgtcttttccctgtttccaaagcatgatgcaaggcgaaattcaacgaagccaacgttttaccgcctccggtcggaaccgacaatcggtaaatccctgtctctctgctcccagcctgacggcactgttccgtaatctgttgacggattttattgatttcggatgtcgaatcgaatgatttcatgctttcgtcaagacggcgaatcagttccgaccaatccgccttgattggatgatattgctctttcgtctcaaaataagccgtatctgttctatcggcatcaatcaaacgagaataaacgtatttaactagtaatcccgagtagaaataacgactatctttcgacaatttcagcaatttagttcgtcctgcaaaatcgaaaacatctttttcggcctgctggaaggtgtcttgcaagtcgagatccaaatcatgtagcccctgtttgatttccccatacgcatatttaggattctgtttatctgcttccgtaaaacctgtgagaaaagcctcatcaccgatttcattgatgcaatcaggaagctctccatgatgttttgcaataacaagttcaagaatctctttcacgatttccgctgccgaattcgaaatcggcaggtcattgacgacgaacgcaccctgcctcgcatgaggaatctcaccacgacgtcccttgcctgatatcagatacgtttgaaactgttgcgcgacctttccaacatcatgcaggagcgccgccattcgcggaatctgagaaaactccgattcatagctttccgctaagtcacccgcattgtgaagatggtcacgcaacgtctgcacaccgccatccgcgtccttgtgcgccagcaaagtcataatctgctccttcacagatatgttcaagcacccctacattaccatagcgttacagttctcacgagcattgcaacgaggttcggcatatagagacagaagactttcaagtggaataatccgcatatacgcatactcattggtatacctattcatatctttccattttcaattccaaatggaaagatatgaatattttttgcgttagctacatttaaccgaataagtgtagctaaattccgcgttagccacatttattcgcacatagaaaaaccggacagcggattcttggaatccacccacttgggcgaacccattgaatccgccgtccggcggcgcgactgcttctcaagaatgtgtgcttgactcacatggatggtactgagaaccattcgcttaacgatctgtttccgtgcgcgccaaccgcgtaaggaacgcggctgcgcggcacggacacaaatcaagtcttgagtggactcgagccgcggtgggcaacgccacggcggctcgaaagccaagggattactctagccgcagcttggaataatcgcaagccgaccgagcttcgttcagttcaggccttggcaacctccacgctgagctcggagccgccttccttcacgttgaaggaggtggcgagcgtctcggaggcgatgagatccttgaactgctcgaccttcgccacgtcatcggccggcacggtcagcgtcagcgcgatgcggtcggagatttccagatcggcggccttacgggcgtcctgcacggcgcggatcacgtcgcgggcgtagccttcggcgatcagatcatcgttcagctcggtgtcgagaatcacgaagccaccggtcggcagcgcggcggaaacggagttggcggcctcttcggcgttcttctcctccacgctgttgatcagctcgtattcgccttcctcaagcacgatctcaccgttcggcgtctcgcaaaccggagcgccatctgcgttcacatgccatgcgccggacttggaagccttgatggcgaactgtacgtccttgcgcaggcgcttgcctgccacgcgagcgttcacacgcagctcgttgatgatcttcaagccttgggcttcggcatcctcaagcgtgcacagttcaacgttcttcacgttcagttcggatttcagaatctcgtcgtatgcggccacggcatcagtgttttccaccaccacggtcagcttatgcagtggctggcgcacgcggatctgcttcgtcttacgcatcgacagggtgccggacacgacctcgcgcaccttctccatcgcgtcaaccagagccggatcgtcaacgagcacacggcccagttcgctcgcttcgccagtctgctcgtcggcaaggaacggccagtcggccagatgcacggattcaccaccggtcagaccacgccacacggcttccgcttccatcggagcaagcggtgcgatcacgcgcatgaatgcttcaagcacggtgtacagcgtgttgaacgcgttcgcatcctcattccagaaacggtcacgattgttgcggatataccagttggtgagcatgtcgatgaaatcagacactgcttcgcaagcgtcggagatcaggaagtcatccagcgaatgctgcgtcttctcgatcagacggcgggtacgtgccagcaagtagcggtccatttccggcagtgcggcaacctcatcggcacgcaacgcacgagcatcgaacccggcaccattattggcagcgttcgcatacagggtgaagaagtagtacgagctccacaccggcagcatgacctgacgaacggtgtcacgaatgccatcggcggtcacgatcaggttaccgccgcgcaggatcggcgagctcatgaggaaccaacgcatggcatcggagccgaaatcgttgaacacaccgttcacgtccgggtagttgcgcaagtgcttcgacatcttctgaccatcggaaccgagcacgatgccatggcagatcacgttcttgaacgccggcttgtcgaacagtgcggtcgccatgatgtgcagcacgtagaaccagccacgggtctggccaatgtattccacgatgtaatcgcaagggaaatgctgttcgaacgtctccttgttttcgaacgggtaatggtactgggcgaagctcatggaaccggattcgaaccagcagtccatcacgtcggtgatgcggtgcatgtggctcttgccggtcggatcgtccgggttgacgcgggtcagctcgtcgatgtacgggcggtgcatgttgacattgccgtccttatcgcgcggatagtcgccgaagtcggccttcagctcgtccagcgaaccgtacacgtcaacgcgcggatacttcggatcgtcagacacccacaccggaatcggcgaaccccagaaacggttgcgcgagatcgaccagtcgcgggcattggcaagccacttgccgaactggccgtctttcacattgcccggaatccagttaatctcctggttcagttcgagcagacggtccttgattttggtgacggacacgaaccacgagctcaccggcttgtagatgagcggcgtggcgcaacgccagcaatgcgggtaggagtgcacgtaactcttctcctggaagagaatcgcgcgctggtcttccggaatacgctccagcgggccgtcaccggcacgcaggttacgcagaatcggcttgttcgcatcgaacacgtacatgccctcgtagtccgggcacagcgcggtgaacttgcaacccgcgtcgagcacgtcaacgctcttgatgcccttggcgttaagcgtgttcatatcgtcctcgccgtacggagcctgatgcacgagtccggtaccttcaacggtatcgacatagtcggcggtgaagatctgatagccttccggacctggaaccttgccttcggcggcgttctcgtcgcctgcgaagtacgggaacaccgggtagtagcgccagccttccatctcggcacccttgagttcgcgcacgatctcatagttctcgccgagttccttggcgtaggagccgagtagcggcttgcccagatagaacttcttgccagcgaacttgccttcagtcggacgcacttccacatagtcgatgtctgcgccgaccacaatggcgaagttggtaggaacggtccacggcgtagtggtccagaacaccgcgtaggcgtcttcctcatcgcgcagcttcacggccacggacacggtggtgtcttgacgatcctgatacacgtcggcatccatgcgcagctcatgcgcggaaagcggcgtctgatccttcgggcagtacggcagcacgcggtagccctgatatgcgaggcccttgtcatacagctgcttgaacgcccacatcacggattccatgtatggaatgttcagcgtcttgtagccatgctcgaaatcgacccaacgtgcctgacggtgcacgtagtccttccactcgttggtgtacttgagcacggaggcacggcaggcatcattgaacttgtcgatgcccatttccttaacctgatcgaccgaatcgatgcccagttccttctgggcttcaagctcggccggcagaccgtgcgtatcccagccgaacacacgattgaccttgcggcccttcatggtctggtaacgcggaatcacatccttggcgtagccggtcagcaggtggccgtagtgcggcaggccgttggcgaacggcggtccgtcgaagaagacgaattcgttctggctgtgatcgccggaaggacggcgttcaatggacttctggaaagtgtcgtccttctcccaataatcaaggacggattcttccagcttcgggaaactggggttcggcgctacattggcgctctgctcacccgcagctgccttcggatacacgctgttttcgctcaccgtatctcctcgtaggttcttgctatctatctcctacgaggacgatggccgtaacgtctgctggacgccgccaccgcggtaccacctcgtttgccgcactttcaaatatacgtgcgaccgcttgtatgttcggctattcgggccttcccgccgggtctaataagccgctcacgcgaccgttcttccggaagctccccgctgataacggatcatcgctcgcatttcggttgtcactatagcatgcagcgcgaactattttcgcttgttttgcatgattatggacgatttcacaataggtttcatggcgattcacaatagctcttatgtaggattacatacaacagaaatgccgatactgacagcccatcagtatcggcattgtaatcgtattttcaatatgtatttttagaacatactatgttcgatcattcggagatttcaccggaagcaagcttggcttcgagctcttcgacaatctcgtcgtgcatcttctcggtgatcttcaccttgaagaggaacacgagcaggctcagcacgatgatgcccagcggcacgtagaatgcgcagaccttgaacatgccgatgttcgcggcggtcatatccgcggcggttgcgtcaccgatcatgcctgcggctacggcgatgaagccgacgataccgttggagcatgcgcctgcgatcttgtcgagcatcgggcggacggacagggtgacggcctcgttacgcttgccgttcttgagctgaccatattcgatggagtcggtcagcgacaggatggcggtcatctgaatgaaagtctgcggcaggtagaagaagaccagaccgacgatgaccattgccagattgctggagccgacggcgaacagcaggtagccgacgatcatgagcaccatgccacccaagtacaggtagcggcgcggaatgcgcttgttcaggatcgggtacagcggagccataaccaagccggtgatgaccgggatgacgcccacgatggagtatgcggcggtgttgtcgaggatgtacttgaacaggtacatgagcacgccggtggtggccacgttggcgatggcgtacagcaggtagctcaaggcaacccacagcagctgatcgttctgggccagagccttgaaggcctgcagcgggccgccgttgtcttcggccttggcacgcagcgtggtggtgctttccttggtgccgaacgccacggagcacacggtgaggatgccgaggatggccacgatgatggcgaagcaggtccagccggactggctttcgacgtacttgccggtgaacacccagctgaagtaggtgacgatcgggatgaccacgatggtcagaccgttgtagccgatggagccgccgaaggagccgagtgcggtgtaggtggagcgctcgtgggagtcggagctcaatgccgggatcataccccagtaggaaatgtcacgcagcgagtagaacacgtcgagcacaatgaaggtgatgacgaacagcacgatgaacagggtagtattcacgttcaccagaccgaacagaccagtgtagacgagcaccagcaggatggcggaaacggtaccaccgatgagctgccacggcttgaagcgaccccacttggtgttggtgttgtcgatgacgttgcccagcagcgggtcaatgaagatttctgcgatacgaatcaccacgaccaggccggtgatgatgccaatcagcttggtggcgacgctcttatcgacgccagagaacagcgagctcgtcacgtagacgatgaaataggtgctcagtgcgttgtagaacgcggactggccgacgttaccgaacgagtacgccacgcgagacaagaggttcccgcctttggaaccgttgttgccatttcccatctttgcttctccttagaagtcagatacaggtccttccttgacctaactatcagtatatccccttacctaaagttagtaaaatttatcactgaacatatcgcctatcggcgtgtcatattttgtgagcttctgttcgaaagatagccaaaaacgttattttttcgccatttacacaacaaaataggcaaactgtcgcattatcttgtggcagcttttaccaaaatcgatatttacgatatgcaaaagcttccacatcgaaacgaaaccaagccaatctggaaatagcccgattactatacagaagtaaagaaataaccgctattttgccggcacaaaactatcgcgcaccaccagcgacgtcgacaggtacgcatgctgacgaatcgtgcgtttgccggaaatggcatcacccaacatcagcgtcgccacacgcgcaagctcgttctgatcgatggagaatgtgctcaacggcggcgaggtcaactgcgaaatcgtttgattgttaatgctgatcacgctgatatcgcgcggcaccagcacgccaaccgcattgaacgcctgcagcacgccaaccgcagtcacatcggcagctacgatcacggcatcaggcagcacgccattatggtcgcgcacgaattgctcccccaacgcacggccgttgctcacggtgaacaagccgtcggaatacaccaatccgtcggattgaataccgaaacgccttgcctcacgacggaaatatgtggcgcgattctcctcatcgacctcataaaagttcatcaggcagcccttgcctccgatgaatccaacgcgcttcatgcccttggcagcacaggccgcgaccgcatcatgcatggtctgctgcaaatcaggctgcacggaatcgaacagattcggcgccggattcacgtcaatgaacacgccatacggcatggccctatgcagccgctccaagtcttcctcgctgatctggtcggcgcctatcgccatgaacccgtcgaatttggaactgcgagcgatcatatcgtcgagattgtggaacaccgtcatttccatgcgttgctgttccgcattgcgttcgagcgctgaacgcaaatcggtgaaataggagtcccgcaacgcctcgtcggacttttcattgtcaagcaatgcaacctcatgagggatgacgatgcgcttggtctgcacgctatagccgaggtcctcgctcgcctgaatgatcttgcgacgagtctcttcacgcaccgatagggtgggatccccgttcagaagtcgagacaccgtagcctgagaaaacccggtacgttgcgcaatctctttaatcgtcgccatgtctcgctctccaatttagtaaatcgtttacccatgaaaggataacctattattgacataacgacaaaccaagcgagatttatgcaacgattacgcaagccaattataatcgctgctcatgcagcagtctcatgaacgtatgacggaaccgccttcacggaaggcgggctggccgcagccgaataccatgcatggcaaagacaataagaaatcccttgcttcaaaatcgcaatttcaaagcaagggattttccagaggatccgtgccgttcaaagccaccggccataagggcggtatcagccgacagggatcgaagcgcggctagtgtagaacgctagcgtgtgctcgcatcgctccaattcaggagactattagattattcgagttctacggcacctgtgtagagctgatagtactcgcccttctgcgcgatgagctcgtcatgcgagccgcgttcgatgatgcggccatggtcgagcaccatgatcacgtcggagttgcgcaccgtggagaggcggtgggcgatcacgaacacggtacgacccttcatgaggttgtccatgccggcctgcaccacctcttcggtacgggtgtcgatggacgaggtggcctcgtcgaggatcatggccggcggatcggccacggcagcacgtgcgatggaaatcaactggcgctggccctgggacaggccggagccgtcgccttcgagcacggtctggtagccgttgggcagcatgcggatgaagccgtcggcgttcgtgagcttcgcggcggcgatgcattcctcatcggtggcgtcgaggcgaccgtagcggatgttgtccatcaccgtaccggtgaacaggttcacgtcctgcagcaccacacccagcgaacgacgcagatccggcttgcggatgcccttgacggaaatgccgtcatacaggatcatgccgtcctgaatgtcgtagaaacggttgatcagattggtgacggtggttttgccagcaccggttgcgcccaccaatgcgatcttctgtccgggcttggcgaaccaggtgatgtcgtgcagcaccggtttgtcggggttatagccgaagttcacgtcagtgaagcgcacatcgccctgcaggagggtgaggcgaccgtccggtgaggtaatggcggtttcacgggctttcatggccacttcggcggcacgcgggctcaaggattgcgcggccttgagcgaacgggtgccgtcatcgccttcctcgcgcttccacgcccagtgaccggtttcatggtcaacttcggtcatggtgcgtccatcttcgccgagttccacgttcaccaaggtcacggaaccgccgtcgtcctccggctgctcgtccataagcgcgaagatgcgggatgcgcctgcaagcgccatcatcaccatgttgaactgcatggacacctggccaagcgggttcacaaaggaacgagacaacgtcaacagcgagatcagcgtacccagggtgagcgggccagcaccggacaatccgaagttgccaagtccggaaatcgctgcggatccgccgaaaatagccagcagaatgtacagcaggtaacccatgttgcctacgattggcatggtcacgttgccccacgtgttcgcttcggcggaagcttcgaacagttcttcgttcttcttgtcgaaggtggtttgggtggcgtcttcatggttgaagaccttgatgaccttctggccgttgaccgcttcctccacgaatgcgttcacgtcgccgatggcgatctgctgcttgacgaagtaacgtccggagcgggaaacgaccttgcgtaccaccacaaacaggatcatggtgaatgcgagcacgaaaatggtgacgggcaccgacagccacagcatcgacacgagcgcggcgattgcggacaccgcggacgagaacatttgcgggaacgattggctgatggcctggcgcaacgtatcggtgtcgttggtgtagcggctcatgatatcgccgtgttcgttggtgtcgaagtagcggatcggcagggtctgctggtgggcgaacatgtcgtcgcggatcttcttcaacgtgccctgctccacggtgacgatgacccactgccacagccaactgcagaaaatgccggccgcatacaggcacgccatgagcgtcaacgcgcgcagcagcggcatccaatcaggatcggaggcaccgaccatgggcagaatgtacgtatcgaccagcgactgtaggaacagcgacgatccggcctgggccgcggcaccgacgagaatgcacactaccacaagtgccacacgccacttgtattggaaaatgtaaccgaagatacgcttggtggtgcccggtgcggctttctgcatcggcagcttgccgtgcgattgctgcatgccggccgcgttgttgttgtctttggatttcaatgcggaagtttgttcagtcatctgttgcctcctttcactgcagttcctcaggctgggcctgattcttggtttgcgattcatagatggagcgatattcgtcgcaggtttccagcagttcgtcatgcgtgccggccgccatgatgcggccatgatccatgacgagaatcatgtcggattcctgcacggaggccacacgctgggcgatgatgatcttcgtggtgtcgggaatctcatgatggaatgcggcgcgaatcagctgatcggttttggtgtcgaccgcggacgtggaatcgtcgagaataaggatcttcggctttttcagcagcgcacgcgcaatgcacaaacgctggcgctgaccgccggaaacgttggtaccgccctgttcgatgtacgtatcgtacttgtcggggaattcctgaatgaagccgtcggcctgcgcaagctggcatgcgtgacgaatctcttcatcagtggcgttcggattgccccaacgcaggttttcggcaatggttccggagaacagcacgttcttctgcaataccatggcgacctgatcgcgcaatacttccaaatcgtaatcgcgcacatccacgccgccgaccttcagcgagccttcggtcacgtcatacaaacgtggcacaagctgcaccaaactggactttgcggaaccggtgccgccgacgatgccgacggtcataccggaacggatcttcaaatcaatatcgtcaagcaccggcttttcggaagtggcggaataacggaaggtgacatggttgaaatcaatctcaccattcttcacttccataaccggattttccggattcgtaaccgtgctttcctcgttcagcacctggcagatgcgttcggcggaggcctgcgaaataatgcacatcacgaaaatcatggacagcatcatcatggccatgagaatctgcatggcgtaggtgaccaatgcggtcagatcgccggcggtcaatccaagggccgcattgttgccggatgccacgatctgctgggcacccatccaggcgataagcagcatggacacgtacacgcacagcatcatgagcggattgttgaagctcataatgcgttcggccttggtgaagtccttgaagatgcgctcggaaatgcggttgaacttttcggtttcgtggttttcgcgattgtaggacttgaccacgcggatgccctgcaggttctcgtctaccacgttgttgagcttgtcgtacgtgtggaacacgcgctcgaacaccggatgcaccagtactgccagaccgcacaggccgatggcgagcaccggaatgcaggcgaggaacaccagcgaaatggatgggctgatgcggaaggagaagatccacgccacaatcaccatgatcggagcgcgcacacccatgcggatgatcattgaatatgcgttctgcaggttggtcacatcagtggtcagtcgcgtgatgatcgaaccggtggagaaacggtcgatattggtgaagctgtagccctgcaccttctcaaactggtcgtgacgcaggtttttggcgaatcctgcgcccgcaatagccgagaactttccggccaaaaagccggatgtcagcgaaaccgccgaacaaatcagcagaatcaagccgaatttcaaaatcgccggcatgctgccaccgctgatgccctcatcaatcagcgatgccatgacagtcggaataaggatttccagcacgctttccacggctacgaataccggggagagcaggctggcttttttgtattcgcgcagggatttgcccagtgtgcgaatgacgtgttgctttggttttgacgttgtggacgtcgttgcgtttgccgctgtcactccttgtcctttctttttcgtacttacttgcttacgtgtgttacctgaggttgtttgcgatcgccatttcctgcgacattcgcagtatgcgcgaaacgtattcatcatgagaatcgcgattatgcggattccgcccatcgcatgattcttgcgattcttgcgaaacctgcggcttttgcgaaacctgcgattcgccaaaatcctgttcctgtatttccaagcttgaatatcggctttcgtctccgatcaaacctgttttcaccagattcgtctgcatgacgtcaagcatgtgcatgaattggcggatctggtcgtcatcaagaccttccaacaggattcgttccatgtttttcgcattgtcgtgcagcacttcggcaatatgcctcgatttgtccgtcaatacgatctttttcagacgtgcgtcacgcttcaccgactcgcgggcgatcagccccttctgctccatcagtcccaacactcggcatgatgtggatcgggtcacgccgaaacgttgctcgatgtcttgagggaagatctcctcgttatcatgtcttgccaagtacacgatgatgtcaacgttgccgttgctgacgtcttccgcctcttcgggacgggtgacgcgcaaataccggttgaccacgttgtgcagcgagcgaatggccacgctgggaggcttggtcaggccactttcccagacttcggcaagtcgtgaacctgacggttccttgtattgttcattcgtcacttctgtcacaccacacatgctaaaccgttgcatatacaactgttgtacatgcaacgattagcgtgtcgcgcatctcatcgtccgcgacaaaaaaggccgaggaatcagatccgcaccggttcagcgttaacggatcgaatccctcggccttaagccttgaatcctacgaaactacttggtgagttcagcgtacttctcaagcatgtattcgaagatctgcttgccatcggcgcccatcagcaccgacatgctgttgatcggcatggaatcgaggaacaggcgggtcatgtcgttgtcgggcaccaccggcatgcggccggcttcgccctcggcacgcaggatttcaagcaccttggaaccgagcggatccttacgccattccatgaagttggaccattcggtgagcggctgggccttgccgtcgccgtcgagctccaccaccgcggaaccggcaatgtcacggctggacgtgccgacctcgatggtgtattcgccgctctccacgtgccagtcattgaacctctcagaccagtaggcaaaggcgcgatcgtcgagctcgaaggagacttctgcggattcgccagccttgaggaataccttcttgaagcccttaagctcgtgtttcgggcgaactacgtcggccttgccaggagccacgtacacctgcacggtttcggcggcgtcaacgttcgaggtgttcttgaccactgcgctgacggatgcggtacaggcaccggtcttgacagccttcacgtcactcacttcgaacgtggcgtagctcaggccgaatccgaacgggtagtcgacggccttgttgtaggtgtcgtaatagcggtagcccacgaacacgccttcgccgtagtcgacatgcccctcttcgcccggccagttgatggtgctcggatcgtcgttgatgtcgaacggaatggtctgcgcgagcttgccggacgggctcaccttgccgaacagcacgtcagcgagcgccggaccgccggactggccgagcagccaggattcgaggatgcccttggcgttcttggcccacggtgccacggtgacgacggagccgttggagagcacgaccacaacgttcttgttttcggctgcgacggcttcgagcagtgcgatctgcttggccggcatgtcgagggtctcacggtcgaagccttcggattcggctgcttcggggagccccaggaacatgagcaccacgtcggcgcccctggcagcgtcgacggcttcggcttcgagtgccggatcggccggttcgagatcgagggtgaagcctggggcgaacttggcatccacgccgcgttcggtgagggtgtcgaggaagctggtcatcttggttggggtgatgtgcgaggagccgccgccctggtagcgcggagtgcgtgcgaattcgccgatgaccgtgaccttggcatcgtttgcgaccggcaggatggcgtcgtcgttcttgagcagcaccatggattcgatggcggcccggtgggcgacttcgtcgtgggcttcgatgtcgaaacgatagccttcgatgctcatggccgcgcgggtcttgttgaccaggtcgatcatgccttgtgccatgcggtcgagctgtgccggctggattcgaccgtcgcgtgccgcgtagacgatctggtcgtcggtgtagcttggcggcatttcgaggttgaggcccgcgttgagggaggccacgcgatcatggtcggcaccccagtcactcataacgatgccttcgaaaccccattcgtcgcgcagcacgtcggtgagcagccagtgatcctgggcggcatgcacgccgttgatgcagttgtatgcgcacatgatggtccacggctgggcctccttgacgatgtgctcgaatgccgggaagtagatttcgcgcagcgcacgctgggagatgttggcgctgatgcgcagacggtcggtttcctggttgttggcggcgaagtgcttgagcgaggtgcccacgcccttggactgcacgcctgcgacgatgccgactgcctcatggcccgccagatacgggtcttcggaccagtattcgaagcagcggccgccaagcgggttgcgcttgatgttcacgccgggaccgaggattacggcaaccttctcctgaatgcactcttcggccatggcttcgccgacccggtagatgagttccgggttccacgagctggacagaccagcggccggcggaaagcaggtggcaggcacgcagttgttcaaatcgacttcgccggtggtggccgagttggacttgcgcaggccgtgggggccatcggtgatcatatagccgggaatgcccttggcttcaacaccctgcagatgccaagcgtcgccgccggaagtcagggatgccttctcttcaagcgtcagatcattgatggaaggataggttttttcgctcatacgttcctctttcgcatcgttttcttgagttcgtatcggttaaccgatctgcatgagacctcaaccccgaaatctctactaaccggttggtaggtactttatcaaaaccaacaccgcaacacgccaatcttctttgaaaaatcaattaaccgaccgtaaagtaactgcagtatttacaacttgagagaaatgacgattcataagcattgcagcgcacatgaatcgccatcaatgaagggcaagagagggaatcatcatggccaacgaagaagtcgaccgaagggcggagattctcaacgcggccgtcgaactgtttgggacgctcggctattacggcacttccctgcagaaaatcgccgatcgcgtaggactcaccaaggctggcgtactgcattatgtcggcagtaaggaaggactgctcacagccgcgctggacgaagtctacgattccgaaacggaagacattcttaccgacatggtacgtgagccacgaccgttgatcgccgacatgtggcgcagaatcgtggcggtgaacgcacgcagaccgcttcaggtgcacatgttttccacgttgagtgccgaagcgatcgacccgaaccaccctgcacacgagtacttcgccaatcgtgagctgcataatgccgataccgcgctcaatatccgttggtgcacgcccgaaggcgttgatacgcgtcggctgcttaatgcgggattcgccatgatggatggcgtgcagctgcgttggctgcgcacgcccggccaagatctgaacgccatgtgggcggaatgcgaagacaccctgttccccctgcccatgtgggagggctaccgctaagcctctgccccggcactgcattactgtatggatgcagacgtagaaggaggcatgtatgcggattttgctggcaccggactcgttcaaggaggccgcttcggctgaagcaatcgcacaggcgatggctcgcggcattaagcgcggcgacccgcaggccgaatgccggcttttgccgctttccgacggtggcgaaggattgacgcacgccttggttcatgccactggcggcacgttgcatgatgttgagacggttgatgcggtcggtcgcccgattattgcgcagttcgggtttcttggcaataagcacacttcccgtaccgccgtggtcgagttggcttcggcaagcggacttgagcaggtctcccctgccgaccgtgatccaatggctgcatccacgtttggcacaggcttgctgattcgcgctgcgatcgacgccggcgcggatcgcattgtgctcggcttgggaggtagcgccaccacggatggcggtaccggattggctcacgcatttggatttcgttttctcgatgcgcatgattccgacattccgcttggtggcggcgctcttgttgatttggcaaggattgacgattcaagagtttccgattccatcaaaaatgttccgattgttctcgcttgcgacgtcaccaatcctttgaccggcccggaaggtgccgcccatgtgttcgccccgcaaaaaggcgcgaccgcaacacaggtcgagcttctcgatcaggggcttgcgaatctcgcgcgcgcgatcatgcaatataacggccgcgatatcgagcacactccgggagcgggcgctgcgggaggtaccggaggtggcgtgcttggcctgttcaacgcaacagtgaagccgggaatcgaactcgtgcttaatcttgcacatggccgtgaagcgtgcgcttggactgacgtcgtcatcaccggagaaggttctatcgacagtcaaacgccatacggcaaagtgccaagcggcattgcaaaattggcgcaatcgcaaggaaaaccaaccattgccatcggcggaacggtaacccgtgacccacacaccgtcgaagcactgaacgaaaccggcattatcgcaacattcggcattgcgcccgggccagcagatcttacaacgttgatcgccaacacggaacgcaatgtcgaaatcacctgtgccgcaatcgccagcacattgcgcatcaccgcagctacttcaccctgcgaatcagcatgatgaacaccgcacccagcagcaccgcgaccacagcgatcgggaacagcgccgcataactgccagtggcaagcacaatcgcaccgacaaccacaggcgcaagcacctgaccaacggtgttggcaagattcagaatgcccagatccttaccagcttcttcctgacttggcaacacatcgacgttcaacgcctgatcgacggcaatgtaaatgccataaccggcaccgccgatgcctgcaaacagcatcatgcccaaagcattcggcatgaaacacggaatggccacaccaatcgcgataatcaccgaaccgatcgccacgatgaccttgcggcgctgcagacggtccgacagcggacccgacaccatggacgtgacgatcagcacaaccatggaaatcaccgacatggtggaaatcgtcgccgcggaatcctttacgctcaacccgcagtatttctgcagaatatacagctgatagccggaaatcatgttccaacccaagataagcagcaatctgcccatcaatgccaagtaaaaatctcggcaattcttggtaggaggaatgaacgaacgcagcaactgcttgacgtcgagctttgcggtggcatccgaagactcgacggaagccacagaagcagccgaggagcgttcgcgcggccagatcagcacggtcacgataccggtgactgcgaacagtgccgcaccgatcgcaaatccggtgcccatgttttcaatgaatttcgatccgaggaacgttccggcggatgatccgacgatctgagcaccaccatagaatgcggagaacgtaccacgcacgttttccggaatgcggtcggacagcactgccacagccggagcgatcatcatgttgacgccgacctgcacaatgcaccatccggccacaatacccaccaactgcgcactggagaaggcgagcacatagccggctgccgtaatcagaccacctgccacaatccatggcgtgcgcttgccgaaacgcgagcgcgtgatgtcgcttaacgcaccaaaaatcacgttggagaacagtgcgaatacgcagcctacggaattcatggtgccgagaatcacttcgggcacgcctatgttcagttcggtgaatcgttgcggcagcagcacggccgatccggaagtgcctgcgaccatccaaatcagcgagaagagcacgaagccgacgccgaatcgccatttttcggtggatgtcagtttgcggccgctgtcaggtgcgatatcactcaatactgcggtgcttggctcgcgtgatgcgtttgctgtcatgattccccctttggaagcatgttcttttttgaaatattgaaatgatttgaaatatacgatgaagaaagcttttttcatttttggtatgatcgcagtcccgccgacgccgacttttatttggcttcagcttcggcaggactttcgttcatatgatttcacacgattccgtacgattacagcgccatctgcagatgatgcgttcccgcaacaagatcgacgcgctcatggtcgacgatatccacgaatgccgtggttccggcaggtaccgcaaccgtcagatcaagcacattgtcgttgacttcccattgcacttccgccttgccatatggggtgatgtgagaggtttcggcatgggtgagatctcccccgatcaccggagcgatacggaaccgcttccagccgggttcaacggcttcaaggccgccgatatgcgcatgcatccattccgccaccgatccgagcgcgtaatggttgaacgaggtcatgccgccggggttcagcgaaccatcggctcgcatggaatcccaacgttcccacgtggtggtggcccccataaccacttggtaaagccagcttgggcattcggtggaggtaagcagcgcgtaggcctcgtcgttatggccggtcatggtcaacgccggaagcacgaatggcgtgccggcgaatccggtgcttaccttgccgccggattcgcgcaccaggcaggcgagtcgattgccggccttcacgcggcgcaccggttcgccgtcaagcagtccgaaggcgatggcgagcgcgtaggcgcactgggtgtcggatgtcatggtgccgtcaaggttggtgaaacgctgcaggaatccatcaatcacacggtcacgcagggcggcgaatcgagtttcatcatcggttttgccgagaatatgcgcgatgtgcgtgccttgcatgcagctgcgtgcgtagaacgcggtggcgaccagttccttttcggtcatggcctgcgtaggatcttccggaggcgcggtcggatcaagccaatcgccaagctgcccgagcggatagtccggcttgcgatcccatacgccatcgggcgaaaggtaccctgccacttcatcgatccaatcacggatcagatcgtaggaatcggcgagcacctgcacgtccccgctttccatgtacagcgtccacggcacttccaccgccgaatcgccccacgtggagatggcttgtggatgcgcccatacgcccaacggcacgaacggcacgtagaacggcacagtgccccacttgacctggtcggcacgcacgtctttcagccagcttttcaggaacccatatacgtcatacaaataagccgcggtaggcacgaacaggcagatgtctcccgtccaacccatgcgttcgtcgcgttgcgggcagtcggttggaatggacacgaagttggaacgcatcgaccatacggcgttcttgtgcaaacggttgagcagcggattcgatgtggtcagttcgccggtgcgttccatcacggaatggtagacgcggcaatccatgtcggctgcggtcagttctcctgcgaaaccttcgatctgtgcatagcggaagccgtgcatcgcgaatcgtggctcccaccaagcgtcggaaccgttggaagtgtacacatcgcactgctggcctctgcgcaaggttcgcgtggcgatggatccgtccggttccaacacttccacatgacgtaacgtcacgctttgttctgcttcaagatcgcgcatgtgcaggcggatgcgctgcgaacagttctgtccgaagtcaaccagccatatgccacgaccatcttccgtgttgccgatgcgttcgatgctgaccggctcatgcgattcatgcgcgcgcaccggcgatgtttcaggattttcaatacgtgccgggtcatacatgacttccgcgaccggctgccaggagctgtcgtcgaatcctggtttcgaccatcccggctgttccagtcgagcgtcatatcgttcgccttcgcacagatccgagcagacgatcggtccgagcgttgccttccattggcggtcccatgcgttggaatatatgttctgcatactgccgtcggcatattcgacctcaagttgcgcgaatacggcaacacgatcgccatagaagttggagtaaccgccatcgaagccgaggcgtccgcggtaccatccgtcaccgagccagaatcccaatgcgttggcaccggactgcagttcgtcggtcacatcgtaggtgaagcattccacgcgctggttgtagttgctccagcctggtacgagcgcgtcattgccgactttgacgccgttgatttcggcttccacaagaccgagtgcgcttagatataggcgtgcgcgtttgggttgttccttcagttcgacttcggtgcgcactaatggcgggtgacgatggtcagtttcggattcgctccacgatggtccgacgaaatcggcgacatgctcatgttcttccaatagtccgacttcgaaatgcagggttgcgctcggtttgcccaatggctggtgacttgccgaaacggcctgcatggtggcgaacacttcttcgcgtgaggcgagcggcgcgaactgccatggaataagcacggaagtgtcagtgggcaggtaggtgcgttcttccacaggttgcccgccgggaacacgtcgtgtcactttgagcaggatctgcgcgtcgattggcagcatgccggagcacacccatgtcatgcgtggggctgcggtggcgatgccgagcgcatctcccgggtagtgttccacggtgaagctgatgatgtcaagatccgaagccagcgtactgggcacaatctgcggatcagtaatggccatgatgacccctttgtctacaaaaataatagatcacttatttgtgatggtgggaagccaaagtccgagccatgccgcaaggagagagaaacgaacggcgacgatggctgggactttggctggcaatcgcaaggtattgcataactgacttgcgattggagatattgagttgttatgtgattgctgttgctaatcaggctgcgatcttgcgtgcctgacgttcttcgtcggtgccgtacttcttctgagcacggatcatgatggtaccggcgatgccttcgatgattacgatgccgaagaagcaccacatagtggtctgaatggtttcaggaagcaccagagccggggtgatgagcgcgaacaggccacagcacaggcgggagaagccgttgatgaagccctggatggaggcgcgaatctcgatcgggaaggattcctgggtccacaccttgtacagtgcttcgcctgccagcggggatccgaggttcatgaaggctgtcgcgccgacgatgacccataggttcgcaccgcccatggccatggcggccatggcgatcagcgagatcacgatgcctgcgaagaacgccttgttacgatatttgccgcctgcgatggacgcgaacacgatgttgagcacgagcgtcacgaagttgaggatgatgcccaagccggtggccagggactgggcggctccggccttggagaacatgtaggtctggaactggccccacgtgttggccagcaggttccagccgacgtagaagatcacgatggcaaggaagtaggtgagcagcaccttcttgtcggcgccgaacagcaccttggtcacggaaaccttgccgttgcctacaacagccggacgtgcggcgtcacgaacgtcggcagcttcatggaagcggcggaaggtcggagaaagcagtcgccacagccatgcgatcacagcgaatactgcgaggatggcgaacaccacacgaccaccggtggcaccctgcatggcggaaaccaggaacgcgcaaatgaaggagatgaacacacccacctgccagaacacctgggtggtggagacgagctgtgcggcggtggcctcgtctggagcatcatgggagacgatggtcatggaaaccggcagatccgcgccggaagccaaacctgcaatgatcaggccgatcagcagtacggtgaagttcggggcgaacacgcagatggcggcaccgatggcgtagaacaggttgatccagttgaaaaacagcacgcggccgatcttgtcggccaagcggcctccgaacagcgagccgaaggcgatggcgaaggtcagaataccggaaagcaggccgacctgcgtggtgtcgagtccaaggccttcctgccagaccacaatggttgccgacagaccgacaatgatgccggatcccagcatcgatccgatgcctgcggcgaaggcgagcggcatgtattcgcccaatcctttgcccttcttggttgaagtattcattgctctttccttactttttcatacttgcatgcgttttttcacacaagtatgtccttcttttttcaaatggttttcactgcgttttcaaattgccgaggcatctcctttgatctgtccagcattcagaaaacactgcgattccattgttttatacaccagaacatcctgccgtcctcagcagcacctccagtgatgttgtagttgaaatactacattcgtttttgaaaatttcaaaatcgtcgcgcgtttttcaatatacaatttcaaaagagagcgcgtagactattgatacatcaaggaataaccggtttatgtacgaacaggagcaatctcatgccagcagcaaaacgtgtgggcgtttccgacatcgccaaacatgccggcgtctccatcggcaccgtatccaactatctcaactaccccgaacgcgtatcggacaccttaaaagagaaaatcggcgcaagcatcaaagaactgggctacaccccccgcagaaacacgcttctcccccagcgagagaacgccgtaccgcgcctcatcggctatatcatgaccgatatcgaacattccctgttcaccttcatccatgaaggagcgcaggaggtctgcgaagaaaacgacctgcagcttatcgccttgaacgcatcatccgacgcgcaacggcaaaacgaactggtgaaaacactcatcgacatgaacgtggccggaattctgctcagcaccatatccgactcccccgaagacgtggccgcggcacgagcggccaacattcccatcatcctgctcgaccataccaatcctcgtcacgccgatcaggtgtgctgcgtgcttgaaaacaatatggcggccgggcagatcgcagccgatgaactcattcgcatcggatgcagccgcatcgcgttcgccgcacactcattcgactatgaatccgtacaagatcggcagatgggcgtcgaaaaaaccattgcgcgcacgcatggaagcacgcaattggaactcatcaattccaaaggtctgatgtttgaagacggttatcagctcggcctggacatcatcgacacaatgaagcgtagcggcctggacgccattccagacggcatcatcaccgtctcggacgcgcttgccgccggcgtgctgtcggcattccatgaccataacggcccacgggttccagaagatgtttgcgtcatcggcatggagggggcacagttggagaccaaatgccccatgtcgctgaccgtagtgaacgcgcccgctatcgacatggggcgcaaggccatggcgcagatgctcgactacatcgacaatcccgccgcacacgtgcacagcaccacgcttatcgagccgactctaatccgacgcgaatccacacgcgcataatcgcatgcggaacactgttagcacagcccaactcgacgcaacacaacggcaaggtgggtctccttacctggcgaaacccacccttactactattctgcagcgtttgaaaatttcaaaccatcagactgcggcacgggacttgtcttgcaagtcaccgaataccggtgtggccgaaccaagccagtcgcgctgtttctcattgcccatggcattacctcctaccgccattcatcgtcgaagcggcatatcattcaggctccgcatcctcacggagcaacctcacggaatgatagactttgccccgaaggcaaggtcaacacgaacagtgaagcccacgacaaggagacaatacgtggccggcgatgatgacgagctgctgacgattggcgaagtggccaaattggacggcatcaccgccaaggcgttgcgctattacgatgcgcataacatcttgaaaccagccgcagtagatccggctaccggctaccggctaccgactaccgactaccgactaccgactaccgatactacaccccgatcaaatgcttgacgtcgatgtgatgcgtatctgcatcgccgccggcgtgccattggattcgttggagaaattccgtttcgaagacggttcgcttgattggcgagcgttacttgccgcagcgcagtcgcaggtggatgagcgcattcagcaattacgacgattgcagacgtcaatcaccgattattccggggaattggtacgcaaggccttctcccccgaagatgggttggtacgtgccgatttgctgccgacttggctggttgcacaaccttgcctctacggtaatgtttgcgatataaaacgatatttacgcataatgacgtcgttgcgtaccttgattcgcgatgcgcaggcaccgcatttgctgcgcagaggcatactgttggatttggtggaatgcaaggcgttcgcttttcaacagttcgcgccaacgcagcgcatgcttgatattttccattccggcgatcgttcgcaagtaacctacgattaccactttcccactggaaccgttgttatcaatcctcccggaggtcctgcggaaagtcgcgtaatcgagcgtgaatcgttggcgcaatgctttgaggatggcatggcgttggctgaatcgctcgacgctgaggattggccgcatgtcaccatgactgagatttggggcagtcatgccccaaatggttcggcttgcaggctactcctgagcacgcttcaccgagaagcggaacatgagcaacgccagaatctcaccgcatacggccatgccgaagaacacccacatgctggtggagaagccagccacataagcgtcagcctgctgcatgccggcattcacgttggcggccgagaattcggaaatcaacgtggatgccacagccgtgccgatggcgcctgcgagctgctgcatggtattcatcaccgcggaaccgtcggcgttcatggaagacggcaactggttcaacgcatgcgtctgatcgggcaccagcacgaatccggaagcggccatgaacagcgcgtatgccacggcaatggctccttcgtgcgagccgccaagcatcatcgccacatccatcaccgccacgccaacaaaaccgcaggcgatgaacttcggcgggaaatgctctttcaacgcgccgccgatcagtggagccgacaccgcgccaatcacagcgcccggcagcaaaatcaaagcggccgtcatcgacgtatgccccaatcctcgctgcagcagaatcggcagcaagaagttcacaccaagcacaccgccggaagacatgagcagaatcaccatgccgagcgtgaatcccgaatatgcaaacgtacgcacttccaccaacggatgagccatacgcaactgcaatacggcgaacaccgccaacaccacaatggcaccgataagcacactccagaatcgccaatcgccattccattgcgcgaagaaactggccgcaacaataatgccggccaagccaacagccaccaacagcagtgatagcaccgacagatagcccttctcaccgtgacggatgtcaggcacggtagccgcgccaagcacgaacgaaatcaccaggaacggaatcatggcatagaaaatccaatgccagttcaggaattccatcaccaatccgccgaacaccggcccgatggccggagccgcgcacgtcaccaaactcaccaacccaagcatcatgccgcgcttgtggaatggagccttgtcgagaatgatgttggtcagcagcggcagggaaacacccgtgccgagcgccatgatcagtcgtgcggcaagcagcatcggaaagttcaatgcgagcgcgccgacgagcgttcccacggaaaacagcgcgatggccataacaaacaacgctttggtcgggaatttgcgcaccatgaacggtgacgtcggaatggccacggaaagcaacagcagatatccggtggtcagccattgcaccacgtcggcggaaatcgcaaactcttccatcaacgccgaatatgcgatgttcagcgaagtttccgacagaatgccgaggaaggtgagaatggcgagcgtcaccaccacgatggtgagtttgccttcgctcatacacttgtcgttgattgcgccgctttgtacgccgttggtggcggaaaccgtgccgttttcggcatgttcgatgggtatgtctgatggtgcgttcctcttatccgtagacactctgctctttcgatagaaaggttgtgtaatagttcttgcttcgaaattgtcgacgatattcgcatgccggcgcggctacagtttgcgccggcacacaccacacattacgtaaggcagaacattatgtaaggcagaaatgttacgtgaaattgcatgagccgcctacgatcagcatttcgtaggcggctcatatcagtctggcgtgtcgattatcgagttctgcgacacggtttattttggttgcttatgcgacggtgaaggtggtgcgcttcaggtcttcgcggcggctggagtgaccgataagcacttcgaattcgcccggctcaacgattcggttagcttcagaatcgacgatggtgcaatcggaaaccggaatatcgaaggcaacggtcttgctttcgcccggttcgagttccacgcgctggaatgctttgagttcacgatccgtccagctataggaggtcacgatgtcgccgatgtagagctgcactacttccgtgcccttgcgatcgcccgtattggtgagggtgatttcggcatgcacggtgtcggtttcggcgaacatgccggattccggaacattggtgacggtcggttcgccgtattcgaacgtggtgtagctcaggccttcgccgaatgcgaatgccggatcctgtgtgaggtcggcgtagcggttgccgtgctggccgcgaatctggttgtagtagaccggcagctgacctgcatggcgtgggaaggtgatcggcaggcgtccgctcggctcggtttcgccgaggatgatttcggcgatggcctggccgcccttcatgcccgggcttggagcccacagcagagccgaagtgccttcggccggtgtttcgtcaacaatcacaccgttggtaccgatcacggatgccggcagcacctgcggcttggagctgacgagtaccaccacgaacggcttgccggtttcgcgagccacgttcgacagcgcgtcgatcagtgcattctggccgccgagcagttcaagcgtagcggtggagcagccttcaccaatggcttgaatcacatcacccaccacagccacgatcaggtcgctttggcgagcgttttccacggcttcatcgagcagtgcgcggtcgagcttggcggaaacgccgatcttcgggcgaggctggccatccgggtagaactcgccttccggatcaggcaccaaatccacgatattggcaccgcgggagtacacgacctcgcagccttccggagagagctgcttgaagccatcaagcacggtggtgatcatctcgcgcgggtggccgtcaggcatccagttgatctgaccggagctgcccgcccagtcgcccagctgagtttgcgcatcgtcggcaagcggaccaacgaccgcgatacgcttcgcgccagccgcattgaacggcagcgaaccattgttcttcagcaatgccacggcttcgcgagccacttcgagattgagctgctggtgttcttcggagccgatcaccgcattgatgcgttcctgatcaggcagacgcggatcttcgaacagtccaagacggaactttagtgcgagaatacgagccacggcggcatcaatcaacgattcgtcaagcagaccggtcctcacggcttcgatcgcaccctcgtagaacttcggggtggtcatcaccaagtcgttgccggacttgaccgcgtcagcggcggcctgcacatagtccggcttaaccttctgctcccatacggaacgtccgacgttgtcccaatcggtgataagcgtgccctgatagttccaagcgccacgcagcctgtcggaaagcagccacttgttgaaggtgaccggcacgccttcgatggattcgtagccaagcatgaaggtgccacagccttccttggccacgcgttcgaacggcggcaggaaccaggattccagcttgcggtggctcagatcggcttcggaagcgtcacggcctccctgggtttcggaatagcccgcgaaatgcttggcgcatgcgagaatcgcgtctttggcaagcggctcgcccgccttggcaccaccctgatagcctttgacgatggacgatgccatttcgccgatcaggtacgggtcctcgccaaaggtttcgcccacgcgaccccaacgggtgtctcgcgcgatgcacagcaccggagagaacgtccaatgcacgccggtagtcgacacttcctcggcggtggcacggcccgaggcctgcactttttcggaatcccacgtggtcgccatgcccaattgttccgggaaaatggtggctcccggccagaaggaatagccgtgaatgcagtcgtcaccgatcaccagcggaatgccgagacgagttttggtgttcaccgtttccacggctttcggcaggtcggacggtgaggtgtgcagaatggaaccaacatgcttgttgacgattagatcgtccaagtcgccgcttcgcgcgtcaagttgcatcatctgtccgactttttcctcaagggtcatacgaccaagcagatcggcgatgcgttcctcagtgggaagttccggattcttatagggcagattcaccgtattttcagtggtttcggccatgggattgctcactttcctcattgaagcgatttcctttaattaccaattggtagtttaacacgatgcaggcacgcgcgcaagaccataccaacacagaaggcgagaagcccgtcagacccctcgccttctcacacgaatacatgcaatgcaatcttaaataatcagcgatatgcatcccataatggagcgggaaacagcatgttttccatctgagcccactctttgcacaaatcaacttcaggttcacgcaaccaccataattgcacgccatccatgatttccatggccttacgcaccaccggacgcatactcgacttccacgaacccaattgcggaggaatcagccaaggatatcgcgaataatgctcccaaatatcgtccatacgggcagtgaattcatcatgcaacggatgatcaggattcaacgactccgcagaaagcacggtaaacaactgcaccatcatgcgtcggcgcgagttgtgtttcaccaggtagcgcagatacgcgggaaaatgcggcgcggcaggatcactgccaggcataccggatgcgaagaaatcctcaggagtgcccgtttcaccgtaatactcgttgaataccatcgccagcatattgtctttattgcccacataccgaagcacaccctgcttggagatgccaacacgatcagccacatcctgaatggaaataccgttgaacccacgctcgctgatcagctgcaccgcggcatccagcacttcctcacgccgctcctgcggtgattttcggatacgtttcggagtctcttcctctgccatgattccgagtctaatgcaccttatgtcgattgccgttgattgactgactatggcatgtcatcgtgagaggtatccgcccgaatccatccatgacgccatacgcgagtcagatcccacgcctcaagattgccgccgttgcgaggatcccgcggcggtttcccttcgccactacccggtttcgcggagcgcgcaagctggtagctccaatagatctgtcccgccgacacgtcccatgccgcgcgttgcaatcgtgacacttggcggtatgcagccgatcggttttggctgtgtagggcccactgattctccacgcaccactcgcccaccagcacgggaatacgacgagccgccgaacgaatggcgataccactcgcgcccaccagcatccggtacagccatggcagtcgccgcgatcgcaggtacagccggcgtgccggtcccgaaaacagcggatcctccatcgcgatgagatactgatgggtgtcgagcatgacgttgcgcatgccagcacgacgaaaccaaccgccccagcggagtagtcggaaaccgtcatggaatacgatcacggtttccggacgcagcacggcgcgcaaccgggcgtaagcgtcgcggtagaagcgcttcagaaaccgcagtgagacatacgtgctaccggaagcctcatgagagtctttcgccgtgttcgacgtgctatggaacaccgaccagctcactggttcgttgagtacttcgatgctgtgcagggccggttcgtcgcggtatcggcgagccaatcgctccagcacgttcagcgtgtactccaccaagtccgtattctgcgcccatttgcacacacccgtcagaccgccgttgtcgaaaccattctgcgattcgggaacggtatgcaggtcaatcataatcttcaatcctgtctcccgcgcccaacggaacgcgcggtcgaggtacgtgatgcagcccggatgcccgggccagtcgccgaagatgaaatacggtatgggaatgcgtacgaggttgattccgtgaccgacgataatacggaaatcctccagggtgatgtaggtttcgcggtgccggcgcagttcctcggcgagattccgttcggaccagagggatacgtgcgtgcggtgcatccagatttcatcgtcttcggcgctgcgggtgaacggtttcggatccatccatttctccagcaccagccagttgccgaggttcacgccgtcgattcgctcatcgatgcctagcaccatgcgtctcaccgcccttacgctcgggggttgcccgacttttcgtttccgtccatcacaacccatggcaaaacccattcggcccaatgggccaaggaaccgtgcgtcattcgcaacgttccttggtccattgtatgtgccccgcgagcggccacacggccgctcggaatcgaatcacgaccggatcagggtcgttgaatgatcgtggtggccgcccgggcgggatcagtcgacaggcttcgtttcgtccgcctcataatcgaagaaatcaaaatcggcggtcttctcatgcagcgaagcatcagtgacggcaataccgaccatagtgccggtgaactcaccgaacttgcagtattcgtcagagaacgtggtggtatcgaaatccggaccgatcttggtccaattctcgccatcataaccccattcgaaccaagtgcgacggccctcaatgttcaaacggaagtaaatcggcttatcttccacggcaacacgagtgtcaagcatttccgtcttttcgccgttttcgagacgcacgatcgaaatcgcgctgccgccaagcgtctgcgaataatacttgcgcaggaaaatgttattcatgttgtcgtagtagatggtcaagccagcgctgtgctggtagacttccggctcgaactccatcttggtggtcaccgtggcatacacgctcgtcagcttgcgagtaagcaggctcgtacgattcagcgaggcaagcgattcttcaccgcgaacacgcagccagcccgggcgttccgtagcattcgcaaacgtgctcggcatctgacgcggcgagtaataccagttgcccaattcgccgccatcaaagtcatcaaagttcggaatctccggcatcggcacatccggcagattcggttcctcaacctcaatcttcgccagattggaaccgtcagccatacgcagccagccatcagacgtccactgcatcttctggatagcggtttcacggccaagcgtgcaacgcaattccggcacgaacggacggctcgtcaaatgcaccagataggtttcgccattcggcaggtcaacatacgagccatgcccggacttttgcagcacggaatccgggttgaaatagcgcggcttcagatgatcgtcatcggcacgctcgttcgactccttcggctgtgacgtaaccagcgggccattcggatccggctcgtacggaccccacacattgcgggaacgccccatggtcacggaatggttgtagccagtaccgccctcagcgcacataatgtaataccagccgtcacgcttggtcagatgcggagcctcaatgcagccacgatcagtagcaccacgccaaatacgcttcggatagccaaccacatgcttggtttccggatcatattccacgcagcagatcacacccggcttctcatagccttcgcgggtctcccactccaagctgacgatgtacttcttgccatcatcgtcatgcagaatggacgcatcgaaaccggaggaagtcaaatacaccggctcgctccacgggccttcaatattcttcgacttaataagataattattcacgtcgaaatagcgtgcattcatggaattcataacaccataaatcacgtagaacatgtcctcttcctcacaatacgtgaggcaaggagcccaaatgcccttagcgctcggcagcttggtaaggttcggattcgtgtcatcggtaagcacatgggtaagcagctcccaatgcttcatatccttcgaatggtagatcggaatgccagggaaccattcgaatgtggagacggcaacgtagtaatcgtcgcctttgcggcagatgactggatcaggattgaagcctttaaaaataggattctgcagcattatctctcctttgatttctgcttttcttttttcgttttttacttattgcgattttgctttagttattgcggcgcccgccgcttactgcagtgttatttggttactgcagtgtccgccggagtctgcgatgctctattgctgacacgctccaaggccgctctggccagtctttacggtcttcaacagagcatcgcagactccggctcgtaacgcttttgcgttacgttgcgttgcacttacgttgtgttacgcaagttgatgtttttagtgagttttttcttttttaaaggatgggagggaggggaaaccaggattgggctatgcagcggcctaggtcccaagagtcccagccgatccagccaggggtgttgaccgtgtcggtgagcagcttgtagttccagtagtagaagccgctgccgttgctccatgcttcaagctgcgacttggcaacgccttggtagagcgcacgcttttcttcggcactgagcgtttccgcctgcgcaccttcctcgccgttgagcacgctctggccgccgtgggtgtccacaccacagccgaccgagttgaacaggcaccactcgcccacaatcaccgggaagtattcgctcatttcggcgaccatcggagcgtacgtattgcgcacgaaatcgtcgtagccttccacggtctgcgggcaacccatcatttccgcggccatcaagtactggtgggtgtcgaggatcacgttttcgaactctgacgcaagcttgccatctgcgccacgcatgaagtccttccactgttcgatatcgaatccatcatggaataccacagccttatcagtcggcaaagcacccttgtcgacgtcgcgcaggcgacgatatgcggtgatgtagaagttcttgagccagtcgaattcaatcggaccggtgccttccgcaagttcggcatcgacggccttgtatcgttcggtcacgttcatcatcggccaggacgtggtggtgttcggctcgttgatgatttcaatgcccatcagcgcttccctattgccataacgcttggcaagacgctcgagcacactaagcacgaattcaacctcttccggcagttgtgcccacttgcacacgccggagatgccgccattgtcgaaaccgttctggctcatcggagcggtatgcaaatcaataagaatcgtcaaaccgtatttttcagcccagttgaaagccttatcaagttcatcaatacacccaatgaacggtgctcgatcgccgaagatgaaatacggtaccggaattcgtacggaattcaatccccatgatttgatggtggcgaagtcgcgttcgttgatgtactcggcgcgatgcgttttgatgcgtgcctcatagacggccgggtcgagctgcgtcggcaggtaatattcgtcgtcggcggtagtgccatcgaacaatgccgggttcatccacttttccagaaccagccagttacccaggttcacgcccttgatgtaattgagacccatatgcactccttcgtacgttttcaccatagtttctattacttagtaactacttagttaaatgataacacatttttcttctctgcgcaacttgtaacgaaaaagcgtttgcccacggcgaccagtaaccaatcaccacagacaaacgccctgcaacacaacaccggcttgcgaaggtggcaggaagagaagggaaaatccaccacccggcattcaacaaaccgttgccacagccaagctgacgcgttacgcacacatccgcgtcagccaggcaactccccgtcagtccaacacgaatgcgttaaacaaaaacggagcaagcgtcaccttgataccatgatcgacattgcaaggatcagcaaattcaaaaccctcggcatcgtcacaaatccttcggattcatcaatttgcaattgttcgcttccttacggaaaaccccggacccgatcgagaaggggaaaacgacggatccggggcaatcattcaaggaaggattacttacttgaccttcttgatggccatgatgaagaagcagccgatgatggccagggcgatggcggtcgggaaggcgaagttatagccgagggacaccacgatggtggacatgacgaccgggccgcacatctggccaagggtggtgcccatgttcagaatgcccagatccttgccagcttcttccttgttcggcagcacgtcgacgagcagagcctggtcgactgcgtagtagacggcgtagccgaggccagcgatgcccgcgaacaggtacatgcccaaggtggacggaatcagccacggcatggcgatgccgatagcgaagagcacggaagctacgacaaccgggaccttacggcggccgatgagatcagaaaccggtccagagataaaggagccgaccagagacatgaccatcatgatcatggagacgacggacacggtgacggctgattccttaacggactggccgatgtagttctggatgatgtagagctggtagacgttgatcatctggtagctcatgagcatgcagaaacggccggcgaaagccttgtagaagtcgtgggcgccagcgaacttcggcgggcggaaggatacgaggatgtccttgaaagagccctcttccttcggcaggaagtcagcggaacgttccttgggcagaatgatcaccgcaacgataccgccgaggaacatgagcacgcctgcaacagcaaagccgacagtcaggttctcgatgaagaatgcaccgatcatggtaccaatcggggcgccgatcgtggagcctgcaccatagaaggcggacatagtgccacggatgccggacggcacgcggtcagacagcacggcgaccagcggggcaatcatgcagttgaggccgaacatgcaggcgcagtagaagatggtgagcagcaccgcgttatgcgtggtgccggtcaggaacagggtgacgccaccgagcaccgcaccgaaaacgatccacggagtacgacgaccgaacctggagcgggaacgatcggagaagttgccgaacatcaggttagaaaccagggacgccactgcggtgaacgcattgacgataccgacgagggcgtccggatcggcgccttcgatggtcttgtagtgcatcggcagcagcacggcggagacgatgccgaggcctgacatccacaggatgccgaacaccaggaagccagcgccgaagcggatggtgttgaccttgctcagcggcttgccggtttcaggagacagcgacggatccttgtccgcggctgcgatgttggcgttgtacgccaccaaacgctcctctttgcttgcgattgcttcactcatgaaactctctccttcgattcatgtttcagtagtgtttttgttgtgtgacacggactgccccgcccagtcaattaactaccaatcagtaattaacgtatttgttaccgtaaatcatttctgccaaaagcgcaagtcaatcgtgttcgatttgttgattttgcgaatccgacaccatgattccatgtttagttttactcttaagcagaatctcggtttttattacctagtaactgcttagttaaagcgtattacaatctcttttatctgtcacttctcagcgtgttccaacgtttctgccacacttcctctcctccgtactgtaacttagtaagtacaagaaaaggagagagcatgcgccgccgaatcgaagataaacgcaggaaacgaatgagcgccgaagatcgcagaaaagcgatactcgaaaccaccgtttcattcatctcccaattcggcttctggggattcaccattcgcgacgtggcacaagctcagaacatcaccgaagcaggcctcctttactacttcaaatccaaagaacaactccttgaagaaaccctcaaatacgccgaccgcaccaaccaaatcgccattgcagagcatcttggcgttgaaggcgtgaccggcgaagttttgcaagacggcatcgcataccattgcgctctcggactcaaggccatctccacaggaaccgtggaaaccaacgcagaccgacccgaaatggttcgtctctacactctgctcgaaagcgaggccctaagcaaagaccatccggtgcacaagtatttcgaacagcgcgaaatcaatctgctgaaggaatacacgttcgcagccaaacgagatgacgtcgcctatccggaacgcaccgcactgcaggtgctatccgccatggaagggttgcaattgcggtggctcaacggatctcacgatgtcgatttcgttggggaatggaaggccctgatcgaccttctcattccctaaacgttctctttgcggcgatttcagcctgcgatcaccacaacattccagcggccgattgccaatggatcaccctccttgacggctgtaccctccttcagtacgacttcagcagttgcagcctcatcaatattgccgtcggtggcgatgacgaccggagcgaccaccacttcacctgcaaccgggcttgcaacggtaacttcgtcggcggaataattgagcagatacgtcacgttctcgccgagggcattcacaccctgacgaaccgagatctggcccgcgagcgcggttccggcaacggcaacaccagcatgttccacagcctcgcgcataaccgcacgaatggaatcggcgtcaagcagcgtagcaatccactcggcatcgcccttgccgaatgcgtgacgggtgaccgcggcgtaatccttccaagcatagtggccgtaggatgcgagcacctcagtatcagcgtcggcgttcaacagttcgatcagcgactgagcatcggtggacgcggtttcggcgagcgcacctgcgaattccacggaaacgtggccattcgggcgggtgaactggctgtaagtcatgccgaacacgtcggtgagattgtgcggagcgcggtcggcccaaacggtcacttcgtcatcggatacgaaagaacgcatggtggaaaccaagtggccaccattttcaacgaacgtacgcaagcgatccgtagtttcctgagacgtgcagtagagcgccggagtcacgatcatctcatacttggcgagacgttcggccggagcatcggacggcacgaaatcgcattcgacgttgagctcgaacagcgcgtcgtacacgttgcgcaccacgtcgttgtacttgaggttgccgccgaacgggaagcccgcttcgatgaggaaccagtcgagcgcggtgagtgactcgttgctgaccatgatggccaccttgttctgcttcttcaggtgaacgaggcgctcccccacttccggcttgccgatttcgtgtccgaacacgcctgcctcgcggtaggtcgggttcggttcgaggtcgtggctcagcagacccttccagtaggtttcgaacgaattgtggatggaatgccagtgccagtattccaccatgtcagcgccggaggccaagtgcgagtaagcctgcagacgaagctgtcccgggaacggaacccagccatgctgaccctgcgcttcggtttcgagcacgaggaagttcttgccgtccttggtggaacgggtcatatcgccgccgaatgcgatttccttaccggtcagatcgtcttcggtcggatggtagatgtcgacgccggtgatgtccactgcggtcgcggccttgaagtggtcgacggccggctgcacgccgaaggaatagccacgccattcgaaatcgaaattgtgggtgatgaactggtcgtcatgagcgtattcgcgcacaatatcggactgccactgcaggaaggcacgcacctgatcgcgacggaacttgtcgaattcgccgccgagggactcgttaatcgtggcggtcacatccgggaagtcctcccaggaattgatgcggttcgaccagtagtcaagaccgaagcgatggttcagctcgttcagatcgccatcgaacttctcatacagatacttgatgaataggcgctgcatgtcgttggacacggaatcgtagtacttggtttcgttatcgacctggtagccgatcactgccggatggtcggcaacgtgggagatcagcttgcggatcacgcgttcaccgtagaaacggtaggtggcattgacgatgtccatgatctggcgtgcgccatacttgccttcaccgttcggggtgaccgcgagcacgctcgggtcaagcttgacgagccagctcggcactgcgtaggtcggggtgcctacgatgacgtcaatgcccgcgcgctgtgctgcgtcgagtgcgcggtcaacgtaagtgaagtcgaatacgcccggctgcggttcgcaggtactccacgtggattcggcgatgcgaatgacgttcagccccgcttccttcatcatcctcatgtcttcatcgacgcggtcgatgcctttcatcatgaggtactcgtcgtaatatgcggcaccgaaaagaatgtgatctgcctcgtaacgactcacggatcctccatcgtcttcattgacttgttactagttactacttgttgctacgtctaaggttgttcttttgcggtatccccgagtttttctcaagtatccgtatctaacagccattagatataagaaatataaatcttcccgattcagctgtcaagaactgcaaaatttcaggcgtgtcttacctaacaaccattagatacagcgtttccccttgaccaaaaccaaccaatcaccgcaatccacacaaaaagctatcccagcgagcaaatctttccagccactggagcaagcttcccgcaaacacacctccaaaagtcctgattcttccagctagtggaggaattgagacacaaaaggccatagaaacacagctcgcaagaaaactgcacacggcttagcggtagctgtcccagacaggtgaggggaagatcatcttttcgaaggcaagccattcatcgtagaaatcgatgggaggcttacgcatccaacgcagttgaatgccgtccatcgcttccaagctttgacgcaccatcgcacgcatattctcccaaccgccgatttcaggcggcaatttccatgtgtactgggaatagtgttcccacacgtatttcggacgattctcgaaatagtcgtgcaacggatgatcctcactgaacgactcagtttctaacaccatgtatagctgcagcaagctgcgtcggctcgcattgtaacgtaccaaaaaacgcaagtacgcgggaaacagcatgccttccggatcactgccgggtagtcccgacgcagcgaaatcagccggagtgccctcctgatcgtaattgtcggtgaccagcagcgacagcaaccgttccttgttgccgatgtaatgcagcaatccaggctggctcatgccaatcgcatcagcaatatctttcaacgatgtaccgtaataccccttttccccgataagacggctcgccgcagcgacgatttcccgcttacgttcctcaggtgttttacgaacacgtttcttcccctcattagccatatggacagtgtactatctactacccattagacaggcggaaatcatatcaaaccacaacattcccactcgccacataaaaacgggccgaccttcaacagaccagccctgaattacattcaaaaccacttcgagatcacattcagtcagcctcggccaaccaaaaatattcgaaaaacagttttacttctggaacacgtcaggatgcttcggatcgccaggttcgtcggcaagcacaccttcgagtcctaagaattcctgccagaattccagcgaattgccatacggagcggcatggtggccacgcgcctgcaggttcgccttcgcctcaagcacgtcttcctcgcgaatgccgtcgaaatacgattcgagacgctcacgattcgtcggatcatagaacagcgatccgatgatttccgtcaaccgttccgcacgcgccacaggcagcgaatcccagtgacggaattcaatgaagttcttcaaacgcacatcgttgaaatgcgtggaaatcacatgattgatttcgtatgcgttgagttctcgatcaggatacacgtcgttcgcgttctcatagaatgcaggatgatgcagatcggttccgggagtttccaacgcttccggagtgtgcgtcagatcagcgaacatcatcggcgtgctcagcacgtcaaccgcataatcttcccaaccgaagcgaggatcaaacagtcccggaataacgttcgtacgctggaaatccaaataatcccacatgcgctggcgcagcagcggatatggattctcccgcccctcgaagtacggggtgttacggaagaaccatgcaagaatcggaccgatcaccgtacccaaacgcaacttggaaatcgcatcctcttccgaaacatagtcaatgctgatctgcgtcgaagcggagcagcgcatcatgcacggaccaaactggccgacacgacccaaatacgcggtcatcgccttgtaacggtctttcggattgacgggaatgtcggcatagccggacttcggctggtatccgtaattaaccaagcggaagccaagctcgtcaagcaccggatcgacttcgcggcggaacgctccgtaaatcgtgcgcaaatcctccggcttgtgcagaatacccagcgaacattccagctggccacccggctcaagcgacacggaaataccttcgcgcccaaggccaacaagcctgccgttctcccagtattccttgctttcgtcgtaatacgggcgaatgcggttcaacaacgcctcgatgccgttctcctcgtaatagttcacggcggtatcatcgctgttatgcaccggcagatgctcgatttccacgccgaaaccgccggttccgcgctcttggcagcctgattcgaagaatttgaccagactttccacatgcttcggattcggctcagtaagcaggtgtgcgtaagaaattcgtggtgctgtcatgttggcaatcctaccgaaactcattgatgagcacggcgcgattgctatacgaaaaactgatagccaactcttgcgtatcccgaatcgagtacacattttcaattacaacagacatgctctgcaagaccgaccaataataattaacagctgtcaataaagtcagaagcaattaccactatttggagaattgtttgtatatatcaataaaaataccgacgctgaagatgttgtccgcgtcggtattttggtcaattccagtcagtgcttattgatttatctgcctatgatcaggcgacttttttgctttgcgtcgtctcaccctgttgcgcggccttgtgagccttcttggcggctgcgatcatcagtttgatgcggttgagctggttcgcttcggatgctcccggatcgtaatcgatggacacgatgttggcttccggatgcagtcggcggatcttgccgaacatgcctcggccggtcacgtggttcggcaggcaggcgaacggctgcgcacaaatcacgttcggacagccggattcgatgagctcaaggatttccgcagtcagcagccagccttcaccagcctgcacacccacggaagtgacctcgtcggccttcttcacgagttccggcatcggcaggtcctgggagaacttgccgtgtgctaaatcgatcgccttgtgcacaggagcgttgtacatgtcaagcgccttgcgcatcagcgcgtagccaagcttgttgccgcccatgccgaggtaatgctcgttccagtcggaaatgtatgggcgggtggtcatgaattccatgatgcccggcaccacagcctcgcaattctgcgattcaataacgtcgaccacatggttgttggcgtccggctggtacttgacgaggatttcgcccaccacaccgacgcgcaccttgcgcggctcgtccttcaacggcagcgcgtcgaaggatttcacaatctccttaacgagcgtctgatacggcagataccccttgccgatgaacttgcgtgccgtcttggaatagccgtggtgttcgagcgtttcacgcacgatggtgtcccacgtgtggtacagctgattcgcactgcctggcgtcacctcgtacgggcgtacgcgatacaggcatttcatcagcagatcaccgataatcagcgccttgatgacacgatgcaacaataccggagtggcggtgaagcccggattgtcttcgatgccctgcgtggaaatggcgatcactggaatctgcggatagccagcatcgaccaatgccttgcggatcaggccgaaatagtttgtggctcggcacatgccgccggtctgtgtgatggcgagcgcggtgtgttccggatcgtatttgccgtccaaaatcgcgtccacgagctgaccgataaccatgatggccgggtagcaggcgtcgttgttgacgtatttcagaccggtttccacgttttcgcggctggcgtgttcgagaatgtcgaacttgtaaccgccggaacggatcacggattccaccaaggagaagtggatcgggctcatctgcggagccacgatggtgtagtccttcatgtctttgccgaatggcacgcggttggcgtacttcgacatggtggcggaattgtgcgcggatttcttcgcttcgccgatgccgttttccgcggcacgcctggatgcggctttgacggcttcggtaagtttcggattggctttcatcacggtgtcaagcatgacttgacgtcccggagtcggcgcctcagacccggtcttgcggaattcgccctgcttgttaggcgcactgtcttgtttgttaggcatgactgcggcgattccgcgctgcttgttgcgttcgcgttcttcgacggctgccttgagcgagcgcagtcggatttttgccgctcccaagttggagacttcgtcgatcttcagcatggtgtacacgtcggccttgtcggcgaggatttcgcccacctggtcggtggtgatggcgtcgagaccgcagccgaaggagttgagctgtacgagttcaagtcccggataggaggccacgaagtttgccgccgagtacaggcgtgcgtggtaggcccactgattggtgactcgcaacggcattttggtgaccttgcggtcttccacatgacggaagccgtccgcgttcttcttgcgcggatcgtcttcgtccgcggcgaggaaatcactcaggttgagcttctcccccggctgcagttcgcagatcgaatcttcagacaataccaccatgccgagcgagcagatggtttccggaatgccatggttgacttccggatcgatgtggtacgggcggcctgcgagcacgatgcctcggcagtcgtgttccttcatgtaggcgagtgccttgaggccttccatctgcacatcgtgcttgaagacttcgttttcggcataggccgctttgactgcggtttcggcttcttcacgggtcacgttggcccaagcgaattcttcgacgatacggtcgaccatgagttcatggttggccatgttgaagtatgggcgcatgtaacggatgccctcttcgcgcagttccggcatgtttgcgccgatgaccacgggatagttagctactaccgggcagttgtagtggttgtcggtgttgggtaccaggttctcttcgtagctgacgcacggatagaagatggttttcacacccttgctcagcagccatttgatgtgtccgtgcacaagtttggccggatagcagatgttttcggatgcgatggattcgatgcctgtttcgaacagttcatgcgagcttcgtccggaaatcatcactttgaagcccagcgaggtgagcagtgtgaaccagaacggatagttttcgtacatgttgagtacgcgcggaatgccgatttcgccgcgggttgcgtttttgtcggtgagtctgcggtaggcgaagcaacgcttgtacttgtaatcgtagaggttcgggcgatcggaacgcttctttttcgcgtctccgcctcgttcgcagcggttgccggtcacgtagcgggatccgtcttggaaggtggtgatggtgagcttgcagtggttttggcacagtttgcacacgtctcgttcggaggtcatcgacaggttgtcgagttcttcgccgctcaaaatgttcgatgcggtatggcatacgcctgcgatcaccgcctctttggtgtcggtggtatcgacgtcttcgtcttccgcttcgtcggcatagtgcatgcgtgcggtcagtgcggcaccgtatgcgcccatgagtcctgcgatgttcggtcgggtcacttcacggtctgtgagcagttcgaatgcgcgaagcacggcgtcgttgaggaacgtgccgccctgcactaccacggtgtcgccaagttcgccggaatcacgcagcttgattaccttgtagagggcgttgcgcactacggaatagcacaggcctgcggcgatgtcttcgatggacgcgccttccttttgcgcctgcttcacggacgagttcatgaacacggtgcatcgggagcccaaatcgaccggatgggtggagttgagcgccgcttgggtgaattcctgaatggtcagacccatggaaatggcgaacgtttgcaggaacgatccgcagccggacgagcatgcttcgttcactgcgatggagtcgatcacgccatcgttgatggcgagatatttcatgtcttggccgccgatatcgatgacggcggtaacgcccgggctgaccatttcggcaccgcgatagtgagccatggtttccactacgccttcgtcgaggtgcaggccggtggtgatgaggccttcgccgtagccggtcgcacaggatcgtgcgatccatgcgccttcaggtagttcggcttggatttttttgacgatttgcactgctgccgtcagcgggctgccttcgttggtcgcataagaggaccatacgatttctcgatcgtcgttcaccaacgtcgctttgatggtggtggaaccggcgtctatgcccaggaagtgcggtccttgggctccttcgagcgtgccttgatggatatgctcgcgatgatgccgttcgttgaatgcggtgcgatccgcctcggtagcgaacagcggaggcatggtcggagtgttggacggcaggttttccagttcgtccagtcgtgccagaaggtcggcgcaggttcgtgcttcgtaatgcttagtcaaggtcgtcaccatcctgatcggcctgcaatgcggcaccgtatgccacatacaggtgagcgtcggtcggaacaatgaattcgtccactttgccgtcgagcgcccgcttgaacgcggctctcagttcggacatgaagaacaacggaccacccaggaagatcacggttccgtgaatcgggcgtccggaggcaaggcctgcaatggtctgcgtggccactgcggtgaagatcgatgcagccagatccggcttggccgcaccatcgttgataagcggctgcaaatcggttttggcgaacacgccgcaacgtgatgcgatcggatatagggtttcgtattgcgtggccatttcgttcaggccagcggcgtcggtgtcgagcagtgttgccatctggtctatgaatgcgccggtaccacctgcgcaggaaccgttcatacgctgttccggagtcggcttgagatacgtgattttcgcatcctcgccaccaagttcgatgatcacgtcagcctgcggatattccttgtcgatggcttcggtttcggcgatgacttcctgaacgaagggcacgtcgaggctgtctgcgagggcaagaccgcctgaaccggtgatggccaggcgaatcggctcgtcgcctcggccaagcttttccagctcctggtggatgtcggccaatagtccggccacggtggcgcgcacgttcgcgtggtgacgccgataatcggagaacagcgcgtccgcgagcgcgtcggactgatcgagcaccaccgccttcacagtagtggaaccgatatcaagacctacacgcaacggctttgtgccgtgcgtttcggtcacggcttctgctgcttcaaccatgtctcaacctctatcgttctatccgccgggctgcattccatggcaggcatggaagcccccaccccgggttatccaatcatgtaatcgtagtctgtgcccacgcctaagtgctttgtaaatgctcgcaatcagcataaaatgcacgacacagcgcacaaattagacaactaatccagtcaacgtgcctaattatgtatctggacgctcgacgaatgtcgagatcgcaaacccttccaagcatttccatgtcaggatgcgctgccttcccctgcagaacggtctttgccgtatatttcgggaatgaatcgtgtttgatcatgtaatttcggccaaatcaccacttgtccgctttccagtgatttcggcacgtcgatgatgcgttggttgctgcttccgcggaattgcagcagggaatcatgtaattctttgatataacggccatccacgagaatgtcgatcagttcgagcagctcgcgcttgtcggggctttcgccttcgcgcatgagctcttcccacgtgtagccggtccagcaccaaatatctttggtattaccgaaccgttcgcgtattttgcgcgcaaggggcaacagcacgcccgtgttgagcaatggttcgcctccgaggaaggtgatgccttgcacatacgattggcttaagtcatccatgatttgcgcttcgagcttgtcgttgtattcgtggccggcttggaaatcccagattgacgtgttgtagcattcctcgcaatggaacgggcagccggacacgtacagcgagcatcggatgccttctccatcggtcatgaggaaccgtttgtagtcggcgatcatattgcggctcatgcggttggtccattgccctgctttgggattgttggaacgagttgtgggaatgaaaggtccgcgattggtttcgtccgccgcaaagtcacgacgttgaattgctggattcgcgctgctgatcatacgttgtcccttcacgttttgccgttacgtcgcgtttttgcgattgctgcttgcctcatgattgtcacagaatgaaagagggtggaaacccaccctctttcatatttcgtttatgtttgctaccgacgcggcccttacttggcttcctcgaaccattcacgttcggaaccgtcactcaaggtgacatgaccggtttcgccgctcatatgcttgacgcggtgcgcgatctcctcgtgacgcccatgcaccatcgggcgctgcaccggattgcccaagtagccgcaggtgcgcttggtcacgttgcagtggtccgggtcggagttgccgcactccgggcacttgaaaccttcctcagtgggctcgaagtcgccttggaatccgcaatcgtagcagcggtcgatcggcgtgttcgtgcccaggtagccgatgccgatgttgtaggcgtaatcccacaccgcttcgagtgccttggggttggactgcaggcacgggaactcgcagtagttgatgaagccgccggacgcgtagtacgggaagtccttctcgtagttgagcttttccattggggttggctgcagccagaccgggtagtggaaggagttggtgtagaagtcgtggtcggtcacgccttccacttcgccgaacttctcgtggtccatacggttgaagcggtcggtgagggattcggccggcgtggagtacacggaatagtggtagccttccgcgtcgctccattccttgcacagctcgttcatgcgcttgacgatggacagtgcgaattccttgccttgcggatcccagccgtgatcgcgcatccagttcttgccgtagaacacgctggtcgcctcatacaggccaatgtagcccagggaaacggtggcacgttcgttgcggaacagctggtcgacgctgtcgttggcgccgagtcgaccgaaagctccgaaacggaacagggtcggcgcattgaccggcgcggcctgcttgcaacgcatgatacggaattgcaatgcctgatgagccacggccatacgctcgtcgaagatcttccagaagcgatccttgtcgccgtgggattccagtgcgatgcgcggaacgttcacggtgacgacgccaaggttcatgcgtccgtcttccacgtccttgccggtcgccggatcaatccaaccctgcaagaaggaacggcagcccatcggggctttgaaggagccggtgatcttcacgatgttctcgtagaagatcacgtccggatacatgcgcttggtggcgcattcgagggcgagctgcttcaaatcgtagttcggatcgcccggatcggcgttcacaccatgcttgatggtgaacacgagcttcgggaaaatggcggtgtgatgttcggaaccgaggccgcggatacggttcaggaagatggcacgctgaatctcgcgggcgaaccagtcagtgcccaaaccgaagccaacggtcacgaacggggtctggccattcgacacacgattggagttgatctggtattccatggtctgcatggcatcgtagatggccttgcgggtctggatcttcgcccacacctcacgcagctgctgcaaacggctggcatccttattgaacggctcgtccatcggcagggccggacggtccttttcgaaatgcagacgcttcggttcgacatccttggccaagcgcacctgacgttcggcgatttcgatcggcaggtcgtcaggcatgatctcgtgggcctgctcaaggaacttgtcgtaatccttgcgcgcgtattcaacgaagttctcatcggcacggttggcggtctggccaccatactggctggatgccacgtccttcatgatctgggtgatctgcgtggccgcaatggaaatgctgttcggcgagcccatcggagcgttgcccagagtgaaaccgttggcgagcatatcccaatagttcggcagcgagcagttggactgcgcggtgaacggcgagtagtcggcgtcgtggaagtggacgtcgcccttcatatgcgcgttggaaaccgcgtccggcatcatggagaaggccgcggccttggaaaccgcacccgccaacagatcgcgctgggtggagtagacgttggaatccttgttggcgttctcgcgcaccagagcctcgtcacggttcaccagacgcttgacggcttcgttgatgtcggtggccttggcacgttcgatgtctttgttcagacggtagttggtgtacgtgcgcgccacatcgtacaggtggtcttcgatcaggccgtgttcaacgagattctggatgtcttcgatcttggcgggaccgttgtaacgatccttgatttcggcttcgacctgattggcgatatcacggatcagctgttcctcctgcggcccgatcttcttatcaaggtcggcgaaggcggacttcaccgcgctgatgatgttgatcggatcgaagtcgaccacacgaccgtcgcgcttctcgacgagtaccttaccggttcccgttttaacggttgcggagacggcatccagagcctgcgtttccattcatcgtcctttccgggtcggaccccatccgaccaggttttcatgcttcgttatgcatgccagattgttgctacgtccatgactgtacgccatagccagcactaaatgtagtagcggcacgccggcagtaaaactatatattccatttttcggcttaattccgccattccttaacttgtgtgacaaaggtaacgatttcgccacggagtgtcgcccgagtgtcgatttgacgcactcaccgaagagggactatacaaggcggggtaccctcacggaattcgaacatgtgtttcatttgtccgcaagatgatggaatcttgaactatgacttggaaccaggattacacacccccggcagcgcagccgaacagcaaaccgctgccacgactggccggcgaaaccaccgctgacaacccctggccggtaagtctgctcagcgagaaattccatatggccgtcgaacggtggccatcggtttgggtggccgggcagatcacgcagatcaacaccagacgtcagggcagcgcctatatcactctgcgcgatgattatcaggacattgcgttggaagtcaacggtttcgggcagttcgccgcagccgctacgcctttcgtgcagggcgaccgcgtcatcatccatggcaaaccgaatctgtggatgaagcgcacgtcactgtctttacgtggcgacgccattatcgcggccggcgcaggaggcagcctgaaggccatgatcgacgaattacgcaagaagctgaaaggcgaaggcctgttcgacgctgaccgcaagcagcctctgcccgagtttccgcattgcattggtctgatttgcgcgccgcaggctcgcgccgaaggcgatgtcatcaccaacgtgagattgcgttggcctgttgtcgatttcaaagtgacgcatgtgcatgtgcagggtgagcagtgcccttccgacgtgatcaaggcgatcgcgcagatggatgccgatcctgatgtcgacgtgatcatcgtggcccgtggcggcggcgctttcgaagatctgatcggattctccgacgaaggcgtggtacgcgccgcggcagccgcccatacgccgctgatttccgcgatcggccatgaggatgattggacgctgcttgatctggttgccgatctgcgcgcatccacgccaacggacgcggcgaagaaagtcgtgccggacgtgcgcgagcagatgcaactgatcaacgtgaacatcgaacgcatgcgcatgcgcatcgacgccaccgtcaacaatgaaacaagactgattgaaggctatgcgaaccgtccaagcctcacacagccgctcaccatgctggaaccgcatcagcgtctcatcgatgatgcaagaacccgcatgagaatcggtctgacacgtattcttgacgacgcaagcctcaccatggaaaaagcgcatgcctcactgaccgcgcttagcccgcaatccactctcaaccgaggttatgcggtagtgcagggagcggacggccatgtaatcgacgatgcgaacgccgtgaacaccggcgaccaactcaccatgacattgaagcacggcgtgatcgtgtccgaagtcaccaccgtaacgaaggagtagcaatgaccaacgaaaccacccccgcatccagcctgaccgacaaggaacgcgaagccatcgcacaaatgccttacgaagaggctcgagatcagctcattcaggccgtgcaggcacttgaggccggcggactcaaccttgaccagtccatgcgccagtgggagcttggcgaagccctcgccaagcgcgcccaaagtctgctcggcgaagtgcgtgccaagcttgacgcagcacaggcggaacaggccactgcggccaataccgctggcacgcaagacaatctggcctgagcatctcaaaataccgtcaatatagcatttccatgactgtgcgccacacgtttttacaaggtgttatatggcgtacagtcatgcataaatttcgaatttcttcatttcgataccacactcgtccggatggtgtgtagaatgaagattcgttgcctcagtagctcagtggatagagcacttctctcctaaagaaggtgtcgtaggttcgattcctatctggggcactttttatgcggatgcgcagccgatatgcagttgcgccggcactcttctcacacgtcgaattgcacggttgccagcaacgccctgtgatcgcttccatcgattttcaacgatttggcctgacctgccaacatgccggaatccaatacgatatggtcaatgcccgcaaacgtcggtacataatcgatattcgcaggccacgtgaataccaatcccccggccgcttgtttggccgcgtccgtgaaccgtgttcccaagaaattacggaacggtgcatgatcgtcggtcgcgttgaaatcgcccatgaacacgtacctacgagacgtatcgtaccggagtcgaccaagctcatccaatgaacgcttccactgctgccaatatccatcggtcggagacgtggtatgcaccgaaacgaaacggatctgcgtctgaccatcattgaatgcaaccgtggctcctggcatgaacgacgcgctcgaatcaacatcatcatcagccggatcaacaagcggactcgccgaccacaaaccattgccatacacgccgtctgaacttgccacctgcgcatacggcagcaaatcgccaataccagccttattcaactcgtccacgaaagcatcggtcgtttcctgcaatgccagcacttccacacgctcgctacgcaccacatcgacaatttcctgcgcgtcggcacgacccttaaacacattgcatgtcatcaaacgagcataatcatcctgcgtattggcggacgctcccgaaaccgctgcgatcgcggcacgcggaagcttcgtttcattgtagaaaaacggatactgccaccatacttgcaacgcgatcgccgcaatcgccagcaataccgacattgttcgtttcgagacaatgccgcaaatcagcgcaatcaccgcaagaatcgcaaaccaaggcaccaatgaaacgataatgggaacatacggccacgcctgaatctcagcaggcagtatgtgcgaaacagtgcccagcaaagctgcaatcgacagaatgccagccagaaaaccgcatatgatattgcgcacgcgatgcgacttagttttcttcaacgtgcgaataggcttaacagccttcgcctgcgccgtacgcggtttcgtaggcgtaccagaccgtgccatacatcctccaacatgggcattgcgttccatcagtcgtcaaggccaagcccatggacgaacgtcatcgataataatgcgttttacggtagcaccatgcccatgagcgctctctcgtaacagcatttccaaatccgacggcattgcaaacctatcagcacatgttcaccggcatcaccaccattgccgtacagcaagaatacccgttgcaatctagtttgttctagttcgcatgacctcgtcgccaagaccagctccaaatctcacacggctcacaccgccgcttggttcgcgtttcacgggggtctgcattgtccggccttggccggcccgtctcacgtcccatccacgagcgtttaacgtctccggggcaccccggctaggctacggccagacacacattttgggctataaccctataaaccgacttgcttgcgcgaatcgcgtaataaaaaaatcccgaggagcgatgctcgactcgggattcaaaaaagtttaagtacggcgacgtgctactctcccacaccctctcgagtgcagtaccatcgccgtgctaggccttagcttccgggttcggaatgggaccgggcgtctcacctaggctctgatcaccgcaagatgaaataatacgcacacatgcctcaatcaccaaatcacggcgtgtcgcagattgcaatcgtctatcgcagccgcacggcatggcgaacagagcgcgcttgcgccgatacgccatcccacttgcgtcgcggatgtcggatcggtggtggcggcacgtgtgcagtcggcgccgttggccgcacaggaggtgaatttgggtgctccccgatcgtcgaccggatcgccacaaccggctttgaccaaagaggcgacttgcacactggaggtgacgggcttgacgaacgatccgccgataccggttcccgcgatggccgaaaaaatgcattcttttgctcaatatatggagacatcatccacgcgcagttttatagattcccgccagtcacataccgacgcgccgttatcaaaatttgcggctcttgcgactactgttgccccaataaccgatatgaaagcacgaaagaaggccagcaatgacgatcgcctcctgcggttccgtttccgcactcacattgggtctgccgaactcctctgcggttcccgcagaaaaggcaacgttgccgaaaggcctgttcgtggcgagaataccggtttcagccaaaacaaaacaacgattggcgaacgacatcgagacgatcaccatgttgtctctgctgcggccaagcaatacacggcttgccgtcggaacacgcattccggaagtactggcaatcggattgcgcctgcatgccaagaacgccgccataccgacggatatcgtcgagctgattgccatgcaacgcaagtcgggaatcgtgttcgtatgcgtgcgcgacgccgacttcgaaggtacgaagcggcaggagtgcgcgttcgccgtgagacgcgcgctgccgggacgcgccggtcacacacctacattcaaagtgttcgtctcagattggaaaccggccggcgaagcgatgctggacatcggcgatcctgcggtcgattccatcgacgcgctgtgggagtcgttatgctcgcaggtgacgctcggcagcgcctctcccacggcactggacgcgcgcatgacacggcgtatgcaggccgcacagcttaccgagcagatcgataagctcacgcgcgatcaccaacgggcaaagaatcccgaacagcgcaacgaaatcttcaccaagctgcacaaggcgaagaaccagttggaggaactgaggaagctggaagcctaggaaccgctagaaaccaaggctcgtgcggccaaactggtcgagccagcgcagaatagccccttcccgcaacgcccatgggcagattgccacttccttgacgtcaagcgccttcatgatctcgtcgatcaccaagccgccaccgacgatctgatacgtgcgctccggcgtgacgcccggcaatgcggtacgctggtccggcgagatggccgcaagacggggaagccaatcctcaagctggtcaatcgtcatgatcgaagtgtccacacggccgggctgacgcaccacggcaccggcgagacgagccagggaacgaatggtcttcgatgtgccgacggcatgcatcgggtgcttcgatttcgggaacgccttgaccatcggctcaagaatcttacggatgttcctgcgcgcgtcttccaaatccctatcattcgcaataccgttttccggtaggaattcacgggtcacacgaccggcacctgccggcacggacagcgctactgtgggatcctcatccgaacccatagccacttcgagagagccaccaccgatatcgatgaccagcagccgaccggcatcccaaccataccagcggcgagctgcaaggaaggtgagtctggcctcatccacaccggacagcaccgtgaccggctggccgacgacgttttcgattcgtttgaggatcctgctgccattcggagcctcacgcaatgcggatgtggccagcacgagcagttgggtaatctcatattctttgaccagccccatggccttttccacagctgcgaccacagcttcgactccggcctttttgattgtgccatcagccttgagatattgcatcaatcgaacagtgcttttcgtgctggcctcaggttccggacgggcgccaggcgccgcatcgacgatgagcatgtgaacggtattggagccaatgtcaagcacgccaagacgagtgacatgcgaatgtaaactaaccatgctttcaagcatagtgacatcgcactccccctttcacctgacattacattgacaacctttgcaaatattcgagtggccatcctattcatctaggatggccacgcaacattcacagcgccgacaacgattgcaaagcgctcacaaacatcatccgtgcagttcggctacgaaatctccgattcgcctcagaccctcacgaagcgcctcgcgcgaggccgcatacgaaagccgcacatgggtgtcggcagtggcctcgccgaaatcacggcccggcgtcaacgccacgtgcgcttccttcagcgcacgctcacagaacgtccacgcgtcgagaccggtgccggaaatattgaaatacgcatagaacgcgccattcggctcaacttccaacggcaaaccgatctcagccaatccgtcgaccacaatgcgacgacgttccagcaactcctgacggcgttcctcgcacacggccaacgtttccggagtgaagcacgcgagcgccgcatgctgggtgggtgtatgcgcgcacaggaagaagttggtggcgagatcgtccatggcttcgagcgcgcattcaggcacgaccatccaccccagtcgccagccggtcatgccgaagaacttggagaagctggaacatacgatggcgtccgggtcgcaggcgagcacggatttcacgtcggagccgtccggttcgcggtcggctaggtcaaggtaggtttcgtcgacgatgcgccatgcgccgcgttcttttgccaggtcgcacacggatttcagggtatcgaaggcgatggtggtgccggtcgggttcgacggcgaggtgatcatcaccgctttggtgcgatccgaccagtattcgcggcacagttccggcgtgagatggaatcgggtgcccgcgttcgtcggcacgtccacgactttgccgccaaacgcgcggaccagttcgcgattgcacgggtacgacgggtcggcgatcagcacttcgtcaccctcgttcaccgtcaatgcggcggcaagcagcagtgccgtggaacctccggccgtgatcgcgatacgtttcggatcgacgtccacatggtggcgttccttgtagaaatcggaaatcgcctgacgtaattccggcaagcccattgcagcggtatacggcaatggacggccatcatactgttcgcgcattgcatcacgcactgcgggcggagcgccaaaatccggctcccccaagctcaacttgaccacatcggcacctgcggcgatcatctcgtcggccatcgcaccaaacaccatggcacggaacggattagcaatctgggcgcggtgcgacatctgcggcagcgcgctgttctcagcatttcccatagttcgtttgtattcttcagacgcgacaaatcgcaagtaccgtctcaccgccgttgcgtatcgtttcgaaaacagaaaatcacatgtcatgtgtaaagctggaaccacgagcatcatgcgccagcggcaaaaatcacgcttcgacgatttcgcaatacagtctctccaaccgttccttacgcacttttttggcgagctcgcattcccacaccacaatcactttccagcccatcgcttcaagttcggcatgctgtctgatatctcgttcgtggttgcgcagcagtttcgcactccagaattccacattcgatttcggtacgcgtgtggctttcaggcagttttcatgcatatgccagaaacagccgttaatgaacaccatcgtacggtatttcggcaacaccacgtcgggatgccccggataccgcttgtcgtttttgcggaatcgcaggcctttcgaaaaaagaaaactgcgtaccatcatttcgatggaggtgtctttgcctcggatatgcgacatgatgtagcttctcgtgccacgctcgtatttctctttttttgcggatttccgaggttttccggtcttcttaacgtgttcctgcgctaccacagcacaccattatggcaagatccggcaaaatacggcaaatcagaaaagcatccggacaaaacgcaatgcaagtgcgatacggatcaacgcgcgttgcgatcacgcatggcgtacgctggaacttgcaacgcagcaataataaatataaatgaatcaacactattcaggcagcttacgaaagatgggagttgatatggctcgtattcatgtcgcgattctcggcgcaggccggattgcacaacatatggctgacacgttggtgaaaatggccgcggacagccgttatgcggatttggttgaaccgtatgctgtcgccgcacgagatgcgggtcgtgcggctgatttcgccgcgaaatacggttttccagtttcatacggttcatatgaggaacttgtggccgatccgaacgtggacttggtgtacatcgctacgccgcacaatctgcatgcggaacaggcgatattgtgcatgaaagccggaaagggcgtgctggtggagaaagcattcggcgcgaatgcggcacagacccgtgagatgttagccgttgcaaaagaaaccggcatgctatgcgcggaagcgatttggacgcgatacatgccgtcccgcgccattatcgataagattctcgcctccggtgcgattggtgaaatacaggcgatcgatgcgaacctgtgttaccccaccaccgcgaaggcgcgaatcactgatcccgcgcttgccggtggcgcattgttggatgttggcgtatatccgatcaatttcatcgacatgatcatgcataatgcgccgatcgctcgcattgaatcgtcgatgcgagcgtacgaaaccggcgtggatgcgcataattccatgacgttctattacgagaacggtgtgatggcgaccgcgcaaagttcgattctgtgccatagcgaccgcacgggatccgtgtggggaaccgatggttatatggtgtgccagaacattaataatgttgaggcgattgacgtgtatgacggcaatcatacggttgttgcacattacgatgttcccgcccagctcaccggctacgaatacgaggtggcggccgccgcacaggccgtaatcgacggtcgcaccgaatgcgaggaaatgccccacgcagacaccctgcgcatcatggaactcatggactccctgcgccgcgactggaacctcacctaccccttcgaacgttaagctccaatattagtttcagcgtcggcgaattgcgattccgttcacacagccgacgctgaagcattcattggcagcacatataatttctccttgcactggttgaggaggaacattatgggattgctgagcaagttcatgaacgcgcttattggagaaccgcccgtctccaaaacggcgactcagcccgggcccaagcttgcgcggcaaaacgttcccaatcccacgcaacagcagacgacgcaacgcaagtccactgtacaatcacgtcaaacgcaacagcttacgcaaccatcccaatcatcacagttggcgcgatcgtcataccgcgcgcaaacacaaaccacagctcgcaatacttctgtcacaacaaatcgttcgcgagcgcaatctcatgccaattcacaaccggctcagaagcttatgccgcaaccgttgcttcccgccgatcagattgcgcgggcgcggaatatcatcggcaaaatcgaaaagcatgatttgaacgacgagcagatcagcgccatcgccggagctggtcacaatacgctggtgcttgcaggtgcgggaaccggcaaaaccactactatcgtcggctatatcgcatggttgctgaacacaggaaccgccactcccgaagagattctggtgctgtcgttcaccaaagcttccgccgacgaaatgtcgagccgcatcacgcaaagcaccggcaaagtcattcgcgcatgcaccttccatagtctcggactggaaatctgccgttcctccaccattgccaatcgtccaattattgacgggcacacgtcaaacaatgtggtgcgtaacgcatttgaatacctgcttgaacacaatgtttcctatcgtcttctggcatttaaacttatgtcgcaacagttgctcgataaatattccacagctgcacgacttgagaatttccagcttccaacagacgattatgcattcaatcaatatcgtcagaatcttatcgataccacacaaaccattatccagcatatgcggtcaaacaatattgacactactggaatgcaagctcttaacgaacgttatggcggtaaaaatatcggtcgtaatcgtgagatgctgcagcttatagaaccgctttatcacgcctatatacagaattttgcaaccaataatggtattgattttccgggaatgatcgttgatgccatcagttgcgtcaataatggctcgtaccgtcatccatataaatatgtgctgattgacgaatatcaggacatgtcacgaccgcgttatgagctaatccgtgcgcttcgcttgcaacatgatttctcactattctgcgttggcgacgattggcagtcgatttatcgttttgcaggcagcgaccttcatctcattctcgatttcgaccgaatttggcacgcctggggtccgacccgcatgttccagatcaccaccacacggcgcttccgtcaaagccttatcgatgcaagcggagcattcgtgatgcgcgataccaatctgtatgtcaaacatctcaataatcccagcgataagaaggattattcgttgaaagcacttggcgggcatactgaggaagaacgattcaatgtgatcgtcgagcaattgcgcaaactaccgaaaaccgcgtccgtactgttgcttggccggtatcgcagcgatatcaatctcatgattcgttgcgatcaaagcggtctgttctccatcgaccaaagcactggaaatattcgttttctcgaaaaaccggatatggatattcgtttcatgaccgctcatgcttccaaaggattgcaacgcgacttcgtatttctgctctgctgttccggcggattgaaaggctttccaagcacgattcccgaagagccgctgcttggtctgctactgccggaagtggaacgatgcccgcatgcggaggaacggcgactgttttacgtggcgatgacccgatgcaagaagaaactgttcttcatcgtggatcagacccgcccgtcgcgattcatgtatgaactgcatagcaagatctgcccgaacattttccgaggagtcaaacttcctccgcaatgcccgaattgcggcgaagccctaagcttgcggcacaatcgcaacgatccgaaccgctcattctacgggtgcaccggcttcccaaactgccgctacacccaacaagcaaaataaacgtggcatacgtgatgtgaaagttttttgcttccaaagatcatttccagctcttcgtcaatgtctgcatgccctatactgctattttgtttcaatcttttgggcctggcgcgatcgcccccgttgtatcctggatctgattttccgacaagagaggaagccacgatgccacgtaagatcatcaatgttgtgggcgcggccattatcaaagatggcgaagtattgtgcgcacgccgtggcgaaggcaagtcactggctggatattgggagttccctggaggcaaaatcgaacttcacgaaagcgcgcgtcaggcattgcaccgtgaaatcgaagaagaactgctctgcgaaattgaaatcggcagcgaagtgtgcaccgcttcatatgattacgacttcggcaccgtcgtactcacaacattcatatgccacttgctgaacggcactccccgactgaccgaacatcaggaaatccgctggctgaacccacaaaacataccgaatttggagtgggcacccgccgaccgcgatgccgttcaacgcatttccatcatggacttgaagaaaaacgatttttcatcaaacaaccaatcgacagccttgtgaaaaagcatgtcacggcacattgtaagcggaaagcacgcggattttacaaaaacaaggaagtgatttgtatggccgattcttctctggtcgaagccgtcatgtcgggttttgttaagaaaaacgataacgcgaattccgaatatgagccgactttgattgccaatcatgacggacgaaccatggaaaaggcactcaaagaagagttggaacgcagccaggatttcgatatgtcggtcgcgttcgtcagccaaggtgcggtgcagacactgaagcagcattttcttgattttgcagataataacaatcatgattccggacgcattatcacgtcgacgttcaactattttaattctccgaaagcattcaaagaactcctgaaattgcagcaggataccggcattcaaatacaggtctggcagccaggccagcagacaacaatccaagatgaaatcatagaagaaacaggtacagaagtaagtggaacgacagcggactatccttaccatccgaaaggttatgttttccgccattccgcaggcaacgaaccgctgtatgccacgtatatcggcagttcaaatctcaccatcaatgcattgaattccaatcgcgagtggaatcttaaggtcgccaccgcagatgatagcggtcttgcggagcaacttgcagcggaaatcgattcgcaaatcagcgaatccaagccgcttactgacgcgtggctcgccttgtatgaggaggatttcaagaaatacgcgcctccccgccagccgaatcgtaggcaccgcaacgattccgacacagccatcaccccgaacgctatgcaggccgaggctttgatgaatcttgtgcaactacgcaaacagggcgaaagccgtgccattataatttcggcaacgggcaccggcaaaacgtatctgtccgcattcgacgtgcgccagtataagccgaatcgcatgctgtacatcgcccagcaggagcaaattctcaaaaaagcgcgggaatcatatcaaaaagtgctttgttgcaccgatgatgagcttggattattttccggaacaagtaaagagcacgatcgtaaatatgtgttcgccaccgtgcagaccatgtctcggccggaaattctcacacaattcagcaaagatgatttcgattatattttgatcgacgaagttcaccatgccgccgctgattcgtataagagaattattgattatttcacacctgatttcatgcttggtatgacggcaacgccggaacgtactgatggtgcgaatatttttgaattatttggcaataacgtcgcgtatgagattcgcttgcagcaggcgcttgaagaggatatgctctgcccgttccactattacggggttggcgaatacattaaggaagcgccggacggcaagtttatggggcagcaggtttccgctgattccatgacagacaaggatcgcactgagttttcccgttggctcgaacagctcaccgaccctaatcgtgtgcgctatatcatcgacaaaatccagatttacagcgaagccggaaccgatgtgcgcggtttggtgttctgttctcgccgtgatgaggcgaaacgtctatccgccatgttcaacgagcaggtgaatcagcaggcggaacgaccgtatcgcacgaaagccattaccggcgaaaactcgcaagctgaacgtgacgaagctgtcaaacagctgaaaatggcgaacttgactatatcttcaccgttgatttattcaatgaaggtgtggatattcctcatatcaaccaaattgttatgcttcgtcaaacgcagtcgagcattattttcacacagcagctcggccgaggtttacgtaaggcaagcggtaaagattcggttgtagtgattgattttattggcaattacgccaataattatttgattccgatcgcattgtatggcaatactggcgatcgtgatgtggcccgtaagaatcttcaacgcgagtccatcggcatttcttcgatcagtttcgataaaatcgcccgcgagcgcgtgctcgcgtcactcgataccgctgatttgtcggatatgaagctgctgagcaagcagtatcagcagatgcgctatgagttgggtcgtattccgatgctgatggagttcgcgcatcgcgatgcgtctttagtgttcacgttggcttcgaagaataacgattatctgtcgttcgtggtctctcgtgagaagagtctgtcgcgcggcaagcatgcgtcggcttcgtatgtggagcagcttgaacgggtgtcaaacgcgcagtctggtgtgctgaaaatgttgactgcgactcagttgcgtggtttgcgcccgcatgagtcgctgattcttgcggtgttgtgcgatttggattggcgtcgcatcaatccggattgttccgacgatgatgcgtcactgtttgaacgtttttccacacagcacagcttgagtttgtttgatttgcaaacattattgtctacgctgtttccgtatgtcgataataatattcagcagtgcggttctgctttttccacattgaattattcgtatttcacaagtgcgaatcgcactcgtttcggcaatacttctttggtttgtatgtgcgacaatgaatcgtatgcattgacccaggaatgcgagtcaatgctgcatcacgcaacattccgaacgttctttacagataccatcgaagccagcttgttcaatgcgcttgcactgtcaagggaagctcgcaagcgtcgcatcatgcctgatcatgggttcatatatggcgagaaatatagtcttgccgatgtcatgcgattgtgcgcgtggaaggatgagcagattccgcagaatgtgggcggatataagcttgacacctacacgaattctttgccgatcttcattaaatatgaggcaagccagtatggcgatcgtttcttgaatcctggagaaattgaatggttcagcaaaaacaatcgttctttgcaatctccggaattcaaatggctgcttgatggaaccgagcatacgtcggaatggaagaatcgtcattttgttcccatttttattcgacgtaaggccgaggaaaaggagaaatcctactattatgtcggttcggcagtagctgtcgacgatgcgcatgagtcagtgaatatcgcagatgacggaacccaatcaaaggtcgtgatttccacactgaaactcgcgaaaccggttgaccccgaactctaccgtcacctcaccggcaacccagcattctagttccagaaaattgctgacgtggcggaaagtcattgttgaaccgacggccgccacgcctcagacatggaaaatgtcacctcatctgcaaaaagtgacacagtgcatcgtcgatgatcgcccaagccttttcaaaccaccttttcacacgtgcaatccaccctacaatcatatgcagatgttcgtttgaacagaaaagtaacatgtttttgcagaacaaaaagaacacgctcaatgttactttttacaatgtcattttcaagacttgcaatcattgcaacatcaacgattctcagcatcatcaattgcaaaaacagtattttccgcggtatcacagctaaaaaagcgtgctatcgttaatcacggatacagcaagcatccatcaacaacatgaaccagacttcaagaaatgatgttcgtttgcttatctaaacgaacattaaaacgaacactactaatgttcatgacattatgcgaacatatcgcaggaaaggaattcatcatggcagatgaaaagaccgtcatcaacgtggatctgaacatgttcggccaggacgcggacgccaagaccgccgcagccaacgaggttgccaagagcctcggcatcagcgacgaagccctcgctcaggtggaggaattcaaggcagccctcaccgcgcataacgcttgggacctgccgttcatgggctacgtgaacgaagacggttacggctacgcctatgtgccggacgcagccatcaccatgaacccgtattgggatgcgcacaaggaattcatgaacctgccggaagacgtgcagaccgctttcgccatccgtatgctgttcacccaccgccctgtcgaccgctacggtgccgacatgttcctgcactaccaccgcggcttccaggtcaacttcgtcggcagcggcgccaacaagtactgaccgccccagaggacgttgtatgagcgccccataggacatataacgattcccataccgccgcggcggtactctccagaaaaagaaaggcgcttggctcgagccagaaaaaccagctcaagtcaagcgcctttcgtatgcgctgaaacgaaactaccgcgcgtctctacaaatcgcccatatcaggcgcatcgaatcccatgccaggtccttccggccccggaccgcccggacctccgaggaattcgcgcgctgacatgccattttccttacgggatgagtccacggcctcctgcatcacccggcgaacctcaaaaccatgcaccacgttcttcagtaccacaacaccgttgccggaagactggtcgcgcgtatcaagtaccagcgtgctcaaaccgaacaggcgctgcaggaacgtgcgctccacactaatatccacgatgcggaatagtttgatgagattgaatttctcgttaaggatgccggttttgatgctcatttcctgatcagtgagcatgtacacggtgaacgtgaacggcgtacgacaccaattacgcttgcgctgacgccacagaacattaccgcttgcaaccttcatatcattcccttttccttcgatggaaagccgccctgttgcggcaacactgccattctaccgggcgccgccgtacggccatgccgctcattccaaatcatgtttcacacatcgtttcacacagtatttcggcataatcttttcgctcaatcaaaaagaaatgcaacagcattcaagcgactattcaaaatcatcggcttttcgccgtgaaaagagcaaaaaaacatgcgcgacaacggcagcatgatataggctgaataaggatatgtcttgttccacgaagcacccgtcgtcaacgcggcacatgcaatccatgtttttaaaggaaaggcatgcaatgagcaacgaacacggtaggatcaaccgtctgcaggaagtcgaggatctcaccgagtacatcaacaatggatggctgcattccggcgaatccgacggcccgacgttcctatggaacgacatgatccgcgaggccagtcaggaagatgccgaaaaccgcaataatgtgcccgtagcacagctttccgacgcggacatggtaatcagtatgcccatgcaatggtatttcgattccatcgccgccatggtgcccacagccgaacgcaccgataccggcgtggagattccaagaatcgacatgccaacgttccatcttgattcgcaggcgctttccggcgtggacgcggtggtcggcaatgccatcgtaagcacacgttggctggatgctgtcggcaatctcgccaaggcagtggaaatgaccgcgcgattcgttggcaacgtcgcagatcgagacaatgagggcttcgactatttgaaagacctgattcagaccgtgcgcgtgtacatggacgccgtggcctgcaatgccgatcccatgaccggcgaacaggcgctgaatatcatcacgcaagtggcctgcaatgaggattttcgtcttaacgccatgcaaatggttgaactgctttcgtgcggcctgtcgttcgcgcaatgggacgatacgcgcatgttcgcttacgatgcgttgaataagggctttgccacgatgagtgatttcgccacgtctgcttcgaggttgtcaaactcggcagatgattccgacagccgcgacatgcaaactgattcgcagtctgttgcgcaagtgaaaaccgatttgggtttgtttgaagacgctgattccttatccgcagaagatttgaataatctcgcgatgcttgatcctgctttgctttcagaaaaggagattgcgcaggccgcgcagaatcagttcgatcatgccgtacagtttttgcgacatgacttgctgcggattagtggtgacattgatgaggctgatcgtttcctgcgtgacaatcatacttccgaaccgctcgccgatgcgtatgcggcacgtctgattgctgccgaacgttggcaggatctgctcaattttgtcgatctggtgttgcgggacaaacctaatcaggtcacgatgatgttccccgaagaagtggtgccctacgagtgggagacgattcgtgaggccgctttggaagcgctgggacgcagcgacgaactggttgccatgtatcaggaacgcttggatgatacgtatgatcccaataccgcactcaatcatctgaaactccacgcctggttgaatcagcagtagtcccgattcctccactcactggaacaatcctcccgcccacgggccttccggcgtccgttttcctccaccgaatggaggaagacacccgtgcgcgggaataaaaaaggaccttccgggaaccccgatggggctcgaccggaaggtccataagttgaatgcggcggcgtgctactctcccacaccctctcgagtgcagtaccatcgccgcgaccaggccttagcttccgggttcggaaagggaccgggcgtctcacctgggccatgaccaccgcaaaaccaatataacggccaacccccaccgggatcggccggcgaacggaaccagccacacgaccgattccggtcgtggcggtccgggaaccggacaacggacgcgaacaaccaaacgcttcaccggtatcgtttccgtgaccacaagaaacaatgctccttgccatccaacgaaagaaaccaccacaggacgagacccgacccaacaagcgggtcggaaaagtgtgccgcgttcgcccgttagtaccggtcggctccacccctcgcgggacttccacctccggcctatcgaacacgtgttcaacatgcgggctacaggcgctccggggagcgtcaaggaatcctaatcttggagcaggcttcccgcttagatgctttcagcggttatccctcccgaacgtagccaaccggccatgccgctggcgcgacaaccggcataccagaggtccgtccacccaggtcctctcgtactatgggcaggcctcctcaggattccaacgagcgcagaggatagagaccaaactgtctcacgacgttctgaacccagctcgcgtgccgctttaatcggcgaacagccgaacccttgggacctgctccagccccaggatgcgacgagccgacatcgaggtgccaaaccatcccgtcgatatggactcttgggaatgatcagcctgttatccccggggtaccttttatccgttgagcgatgccgcgcccgtgcgccggcaccggatcactatctccgactttcgtccctgcccgaaccgtcgttctcgcagtcaagcccgcttgtgcgattacactcgaaacccgattgccaaccgggctgagcggacctttgagcgcctccgttactctttgggaggcaaccgccccagttaaactacccgccaggcactgtccctgaacaggatgactgttcgaggtgagacgtcaaacgagaacagagcggtatttcaccttgcggctccacacgggctggcgcccatgcttcgaagcctcccgcctatgctacacaatccgcgcctaacgccaataccaaggtatagtaaaggtcccggggtcttttcgtccttctgcgcttaacgagcatctttactcgtactgcaatttcgccgagctcctggtcgagacagtggggaagtcgttacgccattcgtgcaggtcggaacttacccgacaaggaatttcgctaccttaggatggttatagttaccaccgccgtttaccggggcttgaattcaccgcttcaccccaaaaggggctgacggatcctcttaaccttccggcaccgggcaggcgtcagtgcatatacagcggcttgcgccttcgcatgcacctgtgtttttggtaaacagtcgctaccccctggtctgtgccacccccaaacgctccgagggcaagcctcttcacgcccgggggtctcccttataccgaaggcacgggagtgatttgccgagttccttgaccaggattcgctcgatcgccttggtattctctacctgaccaccagtgtcggtttggggtacgggcggcgacgcccctcgcgccgaggcttttctcgacggcctggaccaccggatatcgcgccaaaaagacgcccatcatcacacctcaccctacatgccccacggatttgcctatgggacgggctgcgtgcttgaccacggaaaaccacctccgcggccggctcccattccgtgtcacccctgtgcgctagcctaccaggactacgctcccaacgaccgcggacaccgaaccccgaagggaacgacgccacgcgaccggaggttagtactcatccgttcggctcttacggtacgccgccggtacgggaatatccacccgttcatccattcgactacgcctgtcggcctcgccttaggacccgactcacccggggacgacgaacgtggccccggaacccttggtcatccagcggacgggatcctcacccgtctctcgctactcatgtctgcattctcactcccgcgcggtccacggcacggttccccggccgcttcgccccacgcgggacgctctcctacccaacggccgatacgaccgctgccgcgtcttcggtggtgtgcttgagccccgctacattgtcggcgcggaaccactagaccagtgagctgttacgcactctttcaaggatggctgcttctgagccaacctcctggctgtctatgcgactccacatcctttcccacttagcacacgcttcgggaccttagacgacgatctgggctgtctccctctcgacgacggagcttatcccccgccgactcactgccggaatacacatccacggtattcggagtttggctgctattggtaccccatacgggcccgcaagcatccagtagctctacccccgcgatgcaatcaaccgacgctgcacctaaatgcatttcggagagaaccagctatcacggaatttgattggcctttcacccctagccccaggtcatccccccggttttcaacccaggtgggttcggtcctccacgcggtcttacccgcgcttcaacctgcccagggctagatcatcccgcttcgggtccagggcgcgcgactcaaaacgccttttgagactcgccttcgctacggctcccccaccacgggttagcctcgccacgcaccactgactcgcagactcatttttcgataggcacgccgtcaccccaccagggaggctccgacggattgtaggcgcacggtttcaggaactctttcactcccctcccggggtgcttttcacctttccctcacggtactggtacgctatcggtcagacaggtatgcttagacttaccccacggtcggggccgattcacacgggattccacgaggcccgcgctacttgggacacatgatcggaagacggcaagcttccaggtacggggctggcaccctctgcggccaggccttcaagcctgttcccctggcaagccgttttatgactcccgcccggtccgtcggaaccgggacacacgctcccgcaacaccacgaacgcaacccccgacgggtatcacgcgcccatggtttggtctgatccgctttcgctcgccactactcacggagtatcccttcctgcaggtactgagatgtttcacttccctgcgtacccccggaacaacaaggttccgtgccggcccatgacggccggcgggttgccccattcggaaatcctcggatcgaagccatgttggaggctccccgaggcttatcgcatcctcaaacgtccttcatcggtactgtctgccaaggcatccaccatacgcccttcagggcggcacacgccccgaaaaaaccctaatgatagcttcaaacgccagacgacaaatcatcacactgtaaaaaatgatcacaaaacgatcgatctcgaaaccagactccaaaaaagaagcctggcgaaatcgcgataaagcaagcaggacaacaatcctgcattgctcgcgtccactatccagttctcaaaccaccacgcgccccgaccggacccgacccgcggcccacaaggcccacggcgtcccgccaggggcatccggaaaaccgcacgcgaccacaagtcgcgggtggcggtccgggaacccaaaagcatatccgcaccactccccgccggccccaaggacccgcgaagccaacgatctcttccacaccagcacgcccacgccaaaccggagacgatccccggcacgcgggccacacgacggacgccagaccggcgtcctgaaaaactccgtagaaaggaggtgatccagccgcaccttccggtacggctaccttgttacgacttagtcccaatcacgagtctcaccttagacggctccatccacaaagggttaggccaccggcttcgggtgctacccactttcatgacttgacgggcggtgtgtacaaggcccgggaacgcattcaccgcggcgttgctgatccgcgattactagcgactccgccttcatggagtcgggttgcagactccaatccgaactgagaccggttttcagggatccgctccacgtcgccgtgtcgcatcccgttgtaccggccattgtagcatgcgtgaagccctggacgtaaggggcatgatgatctgacgtcatccccaccttcctccgagttgaccccggcggtcccccgtgagttcccaccatgacgtgctggcaacacagggcgagggttgcgctcgttgcgggacttaacccaacatctcacgacacgagctgacgacgaccatgcaccacctgtgaacccgccccgaagggaaacgacatctctgccgcggtcgggaacatgtcaagcccaggtaaggttcttcgcgttgcatcgaattaatccgcatgctccgccgcttgtgcgggcccccgtcaatttctttgagttttagccttgcggccgtactccccaggcgggatgcttaacgcgttagctccgacacggaacccgtggaacgggccccacatccagcatccaccgtttacggcgtggactaccagggtatctaatcctgttcgctccccacgctttcgctcctcagcgtcagtaacggcccagagacctgccttcgccattggtgttcttcccgatatctacacattccaccgttacaccgggaattccagtctcccctaccgcactccagcccgcccgtacccggcgcagatccaccgttaagcgatggactttcacaccggacgcgacgaaccgcctacgagccctttacgcccaataattccggataacgcttgcaccctacgtattaccgcggctgctggcacgtagttagccggtgcttattcgaaaggtacactcacccgaaggcttgctcccgatcaaaagcggtttacaacccgaaggccgtcatcccgcacgcggcgtcgctgcatcaggcttgcgcccattgtgcaatattccccactgctgcctcccgtaggagtctgggccgtatctcagtcccaatgtggccggtcgccctctcaggccggctacccgtcgtaggctcggtgggccgttaccccgccgactacctgataggacgcgaccccatcccataccgatgaaatctttcccgacaccccatgcgaggagtcggagcatccggcattaccacccgtttccaggagctattccggtgtatggggcaggtcggtcacgcattactcacccgttcgccactctcaccaccaagcaaagcttgatggatcccgttcgacttgcatgtgttaagcacgccgccagcgttcatcctgagccagaatcgaaccctccacaaaaaaactttgcagaaagccaacatgtgactctcaaaaataagaaaattgacgatcgccttataaggaaaggcgcatcgcacgaaaaccccaccgtccttcaaggcctcccggccactcgcgaacgagcggacgatgaactggcaatcattgactataaagaagtagtacaaatacgctcttgagttctcaaaccaccaccacaccagcagaccgtcccgaacctcaggagcggaaccgccgtgctgagcagcgagatataaacttacacgtccttgccgatctacgcaaatcgaccttccgaaaacaccgtgtaaaccgttgaaaaataacgtatctctcggcgtgtcgaaatcgcaggaaaatcgagtgatgagcaccatttcacagcacaatcccgctggaaaaacctcaacatacctcgcgacaggtcaacatccgggcgtgtcgcacacgagacgaacgaatgacagaaaggtacaagacaaacagcgggcaaaacatccagcgggaacagacacaacacgactacgcctgacacacatccagcaacgtcaattcgtccgaccaacttacgccttgccacacaacctgcgagcgactccgtctaccagcgcttgccacagcgcttgccaccattgccgggcctgccaccggcgccccacggcccgcgcccctcggcatgcagcacacccagatgatgcttcatggcgaccagcatgatgtgcgtatcttccaagccaagatgtcgttcgcttttggatgcatccaacgcgccctgacgtttggcatacgcatccaacgtattgttgccgtgcggatgctcatcatcgggaatcgacccctcatcccaacgacggctcatcggcaatgtgtcgatgatcgtgatattgccggcacgatagctttccgcatatccagcgacgttcagcatgaaaaagctatgctcgaaccgggcgttatgcgcaacatatggctgctgttcgagtcgttgcagcaatccgatctgagcttcgggccattcgtcgaacagacgaaagtccgcgctggcgcgatcgcgcacgtcaataccggtaaggtcgagaatcagaggattgccaagcagcgcattctgcgcgggaacgccgaaggaaagacgtgcctggccatatgcatcgccggtctcgtaataatcctgttcgtagcggtagcccgcgggctcgccggcaggacgaggcgagatcatgttcatgaattcgaatccggcatcgatgatgtacacgcgagccggatccgtacccgtagtttcgatatcaatgcccatcaccgtgtcgacgtcacggccgggaaggtaggcgtcacgccaatccgactttttgtaatccgccaaacgtcggtcctgcgcggcttccgccgagtcagcggaaccgccagcggatccgagggagccatagtcgaacaccttcgagcctcccggactcgtcaccccgctcaaattcgcgcgtgacatggcgtaatcgctggcacgcttctgctcacgttccgcggcacgacgttcggcacggccattgacgatctgcgcggtacgatcctgaatatcgttaagattcacgaggctttccgctccggcaacagactgcagcacgggcactatcacccgctcccgccgctcttcggcaatcgtccacaatcccatcgcaacaccaatgcgccgcaacacggcaatttcgtcgcacaacctacggttcgcataggcgagcgcgcgaggcaaacggtatgaagcgatcagacggtcgaaatccgtcatgaaggtggtattgcattgcgcgatgatggattcgagccggtcacggaccgctaaatcctttttcagcagattatgcaactgttgaacggatagtaccgaatcctgcatgggatccgttttctccgaggtcgacgaaaacgtggtatccgcggcattcagaacggcgatcaggtcgatgccttggcttttggcggctccgatgccgtgttccaagtcgagagacatgacccaatgccagtcgatgcgctcattgtcggcgtttttcggcatcgatgccgaccattggctgatgtcttgtttggcttcggtaagccaggaacggcccgtctttgcttcgttcatactttgcatggtagccgagagggggcgcagtacacgtcggcgcgtacaaaaacccatgatgcttctcggatagcgcaatcttaagtttcttgagattcgaaaggttatcttgggttcgttttatttcgttgattttcggtaagagaaagaacaatgctacgaaaaacgattatgttcaccaagcattcgtcgtcaggatacgatcatgcgcgttgcagacggagcacgacgtcgcgtacgaaatcattccatcgcaacgcgaacgccgatattgtcgataatgctgcgaaatgcaaacatggttacgctcatacgtgcgtctgccgtggggagtgtgatgcgtgcgcgcgttgcactggttatgcgcatggtggtatgacgaaaaaatgacggtatgacaaaaagggagaggcctgtgggcctctccccctgcaggatattccgcggattgcgcaacgataggattccgtgacaatcggattccgcagcgtttttcgccgcgcatgtatgcgctttgcggcgtgcgctcctggtttacagttcgaatccgagttcggcggcggcttcggtgggaaccggatcgtcgcaccagaaatcctcaagattctcgttggtggcgaggctgcggatttccgccttgtcgatatacagttcgccgctcagatggtcggtttcgtgctggaagatgcgggccggccagccgtgcagatgttcctcatgctgtttgccatcttcatcctgccagcgggcggtgatgtcgagccagcgcttgcgtaccgcctgatagccgtcgaagctcaggcagccttcgtagaagctgcgggtttcggtgccgatcggctcatagctggggttgatgatgacgtggaatgggaattcggccgcttcacgcgggtcatcgtcatcgtcgtcgcgcacatggtcttccaccacggcaagcgccagtccgaggccgatctgggttgcggcaaggcctacgcccggcgcttcgatcatggtgacgcgcatggtttcgatgagtttgtcgagcgttttgcggctcagttggccttcgtaggctgcggtctgctggcgcagtaccggttcacctgcctgcacgatgggaagcagctgttccttgccgccggttttgatgagtttttcgacctcgcggttgagctcgaggttgactttcgagttacgtccaaacatggggttccttcgcggattggttcgggattttggattgccaaatactgtgtatcggcggtgtgattacaaggcgagttcttcggccacgactttagcgagacggtcgcagacctcgtcggcctgctgctgggtttccgcttcagccatgacgcgcacgagcggttcggtgccggagggacgcaagagcacgcggccggtgtcgccgagcattttctcttcgcgttcgacggccgcctgcactttggcgttggttttggctgcgagcttgtcgacgtttggcacgttgatgagggtttgcggcagttgcgggaagtcggatgcgagttctttgagactcttgccggagttgaccacttcgttgcacaaggtcagtgcggtgagtgtaccgtcgccggtggtggcgaattcgcggttgatcacgtggccggactgttcgccgccgagcgaatagtcgccgcgcagcatttcctcaagcacgtaacggtcgcccacgccggtttgcacggttttgatgcccatggaacgcagggcgagcttcaggccgaggttgctcatcactgttaccacgagggtgtcgtggttgagtttgcccgcgtttttcttggcacgtgcaagaatacccatgatctgatcgccgttgaccatattgccttcgccgtctacggcaaggcaacggtcggcgtcaccgtcgaatgccacgcccaagtcggctccggaggctttgaccatggcctgcagctgttcggggtgtgtggatccggcgttcttgttgatgttgtagccgtctggcgaagcgttgatcacgatcacgtcggctcctgcgcggcgcaacgcttccggcgcgaccacggaggtggcgccgttggcgcagtcagccacgactttcaagcctttcaacggtgtcggctgggacttgtcaggcccgatgggggcgattgtggataccagatggtcgatatacaggttggttgcggttgccgtgtcgtggctgatacgtcccacgcctgcaccggtcgggcgttcccaatcctggccgagcacgttttcgatttcgtcttctttggtgtcaggcagtttgaatccgccgcgtgcgaagaatttgatgccgttgtcgggcatggggttatgggatgcggagatcacggcacccatttccacgttcagcacggaagtcaggtatgcgacacccggagttggaataatgcccgcgtcgatcacgtcgaatccacctgcggacatgcctgcggacagtgccgctgcaagaaaatcgccggaaacgcgagtatcgcggccgaccagtgcacggcgacgaccgtcgaattcgcttttgtctccatcatcgccaagcacgcgcaccgcagcatcgcccaaatccaacgcaagctgtgcggtcaaagccctattcgccaatcctcgaacaccgtctgttccgaacatacgtggcatgagtctcaagtcctcgctatctcaagttatattgccgtgcaccatcgtactcaacgggttcaccattcaacaaaatagtcaacagcatgttgcgatacctgcatactgcagtatgcgatgtcaggcaagccgcagtatgcaacgtcgtgagatttccacaatctcaagtttcttgcgatctcacttccatcctccgattccgaccggccgggtcattatgggtccgaaagacccattgtccataaccgttatgggactttgtttgggatggcttgtctagaagcaaacaagcccggactggcagcgggataagtcacgccgtcagtccgggcttatgatgcaatatcacaagtgatatcagaagtagctgccaaaaacagctactgtagtggtgccaggaacggcatcagagggacgcgttgaaatcgcgcaccttgagcgtgcggtgcgacgattcgacattgccgcgcacaatacgctgcaacgcgttgtcggcgtccgcatgcgaagccagccaagcatcaccgagatccaccagcgtggccggatcggcatagctcggatacaggccttccagcagggcctcagccatgtggaaggtcttgttctgccaaatccagtcggcaacctcgaaatacttggccgcatacggttcagccaagtcgacgcgcggagtggaggcgaagcctcgagccacggattcaagctgcatgttggtcagctcatcgttgtgcaaagcctcgttccaagcccattccttggcctccgcagtgcctgcgaccgcgcgagcgcccaatgcgaactcacggttctcagtggtttcacgtttggcaagctccgcgtcgatatcgctctggccgatggcgttgattgcgctcagcgcgttgatgatggtccagcggaagttgttgtcgatttccaagccgtcaagcttcacggaaccatcgagcagacccttcgcattcgcttcgaatgcggcgtcgcccggctcgccataacccaagtaggcggtgatcagctggaactgctcgtcggaaccggcttcggcagcctgagccagcttgaacagttcggcagccacatgctccaccacttcggcacggtcggccggagcggtgtaatgccatgcggtggtgctgacctgcgccagagcgtaacggaacgtggtggactcatgttccgtggcgagcgctgcaagcgaggtttcgatgaactgctttgccggcaattcgccgtcgcgggtcatatcccagaatgcaagccaaatcacggaacgagccaacgcatcgtcgaaacgatacaggttctccgcagcgaacttgaggctcttctcgtcgaagcgcagcttcgtgtatgtcaaatcgtcgtcattcaccaaaatcagcgccggacgtgcctggccggcagccgcttcgacaatcgtcagttcgccgtcaacatcaagttcgaactggtcggtacgcacgatcttgccggtttccggatcctcattgtagaagccgacagccagacgatgtgcgcgcagcaccggatgctcagccgaagcggactggcgcaacgcaagctggcgaatcgtgccatcctcgttttcctcaacttcggtggcgatggtgttgatgccggactgttcaagccactgggcgctccacgccttgagatcgcggccggacgtcaactcgagttcagccagcagatcggcgagcgtagcgttggagtacgcatgcttgttcagataattgttgatgcccttgaagaacttctcacgacccacatagaacacgagctgcttcaacacggaagcgcccttggcataggtgatgccgtcgaagttgacgtacgtgtcgttcagatcgttgatcggcgcgacgatcgggtgggtggtgctcagctggtcctggcgcagtgcccagctcttctcgccggagctgaatgtggcccaagcgtccttccattccgtggcttcggcagtggcgagagtggacgtgaactcggcgaaggattcgttgagccacaggtcgttccaccacttcatggtcacgtagtcgccgaaccacatgtgtgcaagctcgtgcagcacggtgaccacgcggcgctcggcatacgcgtcggtgaccttcgattcgaacacgtactggtcgcggatggtgaccatgccgatgttctccatagcgccggcgttgtattccggcacgtaaatctggtcgtacttggcgtacggatacggcacgccccaagtcttcgcatagaaggcgaaacccttcttggtgatgtcgaacaggtagtcgacatccttggcgaacgcttcggcgagcgcctgacggcagtacatggacatcggcacggtgcgaccgtcttcgttggcgtattcggtgtgccattcggcgtacggtcctgcgcagatggcggtgaggtaggagctcatggtcggcgtggattcgaacacccacagcttggtggtttcggcttcgtgcgtgccgagcgtgccctcttcggtaacggtttcattgtcggtcacggatgcggcaggcatgttggaggtgacgatccacgacttggctgcaagcacggagaaatcgaacacggccttgatgtcgggctggtcgaacacggcatacacgcggcgggcatccggcacttcgaactgagagtacaggtagatgttgccgtcggaagggtcgacgctacggtgcaggccttcaccggtgttggaatactggcacagtgccttgacggtcacttcgttgtgcgcttcgaggttcttcagttcgatacggctgtcggcgaacgcttcggccggatcgagagtttcgccgttgagtacgatttcgctcacttcggtggcgatcaggtcaaggaagctggtagctcccggctcggcgtcgaacgtgatggtggtttcggaaccgaaattcttggctccacgggtcagatcaagtttgaccgtgtaatgaaccggtgctgcgataacgcttttgcgttcttccgcttcgattcgggtgagatttgctcctggcatgtcactccttatttgtgttgagattcctatttattgaataggagacggcgcaaccggttgtgccggttacgccgtccttcttttgattatgtaatcaacaattattgacgatctgtcgatatttcaatattattccaatattgatttcgctggaatcggcgatattgcgaaaaatattgactatctgtcgattcatcattgcgctgcattcaatcccatcgcttcgtcaacatcctgtgcgatatcggcaacgaccggaacgatcatcggcttgcgatgcagctgacgtgcgacccagctacccaacgtacgacgcatgatctgctgcaacttgtatgtatcgtgcgtgccagccatcatcgcatcctgcaattgctcgacgatctgatgacgaaccttgtcgaattcgctttcgtcttcggccaccgcgttgagatagatcttcggacctgcgacaacgtcagccgtttccgtatcgacgacgacgaagctcgacacgaaaccttccgtgccaagaatacgacgcttctcaagctcgtcctcggtaagttcgccaacggaatcgccatcgacgtacacgtagccgcatggcacggaaccgacaacagcagcttggccgtggtacaaatcgaccacatcgccgtcttcggcaagcaccacattctgcggatcgacgcccgtcttgaccgcgatcatgccgttggccaccaagtgacggttctcgccgtggatcggcatggcgcacttcggcttgacgatgttgtacatgtacagcagttcgccctcattgcagtggccggacacatgcacggcggcattgtctcgattgaccacacgagcgccaagctgcaccagcttgttgatgatcttgtacacgccatgctcgttgcccggaatcagggagctcgcaagaatgacagtgtcgaattcgttgatggtgatgtcgcgatgattgccgtcggcgatacggccaagcgcggccatcggctcgccttgggaaccggtgcacatgtagacgagcttgtcgtcctgcacatcatgggccttcttcaggtcgatgaccgtgtcttccggaagtctcaagtagcccaaatccgcagcgatggacatgttgcgaaccatggaacggcccacgaacaccaccttgcgaccgtacttgtgggcggcgtcgacaacctgctgcacacggtgcacatggctggagaagctggccacgatgatcttgcgtgtggcctgggcgaacgcctgatccagcgccgggccaatggtggtttccggcttgacgaagcctggaacctcagcgttggtggaatccatcatcagcagatccacgcccttttcgccgagcttgccgaactccaccaaatcagtgatgcgatggtcaagcggcagctggtcaagcttgatatcgccggtatcgatgaggcttccggccggagtctgcacgaacacagccagagcgtccggaatggaatgcgtgacgttcacgaactcaagattgaacggaccgaccttcagcttgtcacgacccttgacctcaaccagtcgcggattgatgcgatgctccttgcacttggcttcaacgaaagccaacgtgagcttggaaccaatcagcggaatgtcggggcggagcttcagcagatacggcacgccgccgatatgatcctcgtggccgtgggtaagcaccagagcctcgaccttgtcgagacgatccttgatgtagtggaagtcaggcagaatcagatcgacacccggctgctcctcttcggggaaaagcacaccgcagtcgatgagcagcaggtgaccgttgtattcgatcacgttcatgttacggccgatttcacccaggccaccaagcggcacgatgcgcatggagcccttacggtacttcggcggagcgatcaacacgtcatcctgctggggcgcggtggtctgcggagcaagacgggaattgcgacggcttccagcagaagagcttgccgcgctggagttcttggaacctctggagttcttcgtgttctttgcggccttcacgtttttcgtgctcttcgagcccttggaggagccgctgccgttgccgcgagaaccgccacgaacggaaccggacgcatcgcccgcacgattgccacggccaccgccacggccagaagacttcgccttcttggaagtcgtttcagccttgctgaccttctcagagctcacagacttcacggatttcacatccgcggtctgcgtgttttcagtgcgcttggcagctttgctgccgcgcttgtgcgtagttactgttttggtttcttctatagccatttcctagttggatttctattactaattgtctccgcctgtgcggaaacgaggaattcagttagtttgccgtattacggcaaacccagcaaacttgtgatcgcaacaatgcccggaatcagcgcaatcgccgacaatcaagcgcttcgcaatcacaagtttcgcaatcacaagttcttcaattacagcaagccggaagcgcgcatgccatcttccgcgcgcttgatctcagcctcgcccggaccgacgttcggcagacgcatcgtcgtggagtcgagaatgccacgcaccttcagcgaagccttggccataacagcctggaaaccgttgccgttcattgcttcgaccagtggagcaagctgcacggcaatgcgctgagccccatgaatgtcaccgcggtcgaatgcggcagccaaatcgcgcatcggaccggaagcagcatgtgcgatcacggaaataatgccgactgcaccaaccgaaaggaacggcaggaacagaccgtcatcgcccgaataccaagtcaaaccggtctccatacgcttacgcacggcacccgcgatatctccagtggcgtccttcaccgccttgacgtgaccaagctcagccaaacgacggtaggtttccaactgaatgtgcaaaccggtgcggccaggcacatcgtaaacgataatcggcttgtccgcggaatcattgaccgccttgtagtgacggaacacgccttcctgcgacgggcgcgaatagtacggagcgaccacaagcaccgcatcggcgcccgcctcctgagtctgctccaccatgcgcacggtgtgggcggtatcgttggaacccgcaccggagataacgggcacgctcaccacatccttgacggcctgaaccagctcgaccttctcctccatgtgggtggtgggagactcgcccgtggtgccattgaccacaaggccatcggcgccatcggcgacaagctgcttcgcaagcttctgcgcggcctcgaaatcaacggaaccatcggccttcatgggggtgaccatggccggaagaatacgtccgaaaggagcaggatcaagaagatgcatagtaccgtcagtcatagtgccaacggtacttcccgccacggacgccgaagcgcccgagttcgcgaccatatcgcaatatgaactgccttccaaagaccaaaatcccccacccgctggaacaatcctcccgctgccaagcctcccagagtcccgaaacctccagtcactggaacaatcggtacgctaaacaacccctcacattcccaaaacctccacccgctggaacaatcctcccgtcaaccagcctcccagagacccaaaacctccagttaatggaacaatcctcccgctgccaagcctcccacagtccaaaatcccccagcaagtggaagaatcggtacgcttagccgcatactcagggggattcaagccaaatgacttcacgattttgatctggtgaccgcacgatttcggaatatcgcacgattttgctttcctgaccgcacaacactccaaaacagtgcgatcaccaagagggaaaagtgcgcccaccaaaacaaactcaggcaaggtattgggtggggttctgctcgaacttggcggcgcagcccgggttgcagaagtagtaggtggtgccattgtattctcgggtggctgcagcggtggccggatccacgctcatgccgcagaccggatctttggcgggcgcgctctgattgccgttggcagtgtggccgccacagcaagagcgcatgccttccatactttcgtgggcgttttccttcttggctttgtgatcactgaacagtcccatgatgaatcctttctgactatggttgttgtgattattatcgttcgggttcggctggcgaacctgatacgtcttatttgcggcacgcaccgccttgtctggatcgaacaggcgcagtcggctcgcgttcgtcaccacgcatagcgacgagaatgccatggccgcgcccgcgatcatcggattgagcatcatgccggtgaacgggtacagtacgcccgccgcaatggaaatgccgacgctgttatagccgagcgcaaatccaagattctgtgcgatattgcgcatggtggcgcgggtcaagtcgagcgcatgcaccaaacccatcagcgagccattcatcaatgtcacgtctgcggattggatcgccacatctgtaccggtaccgatggcgaatcccacattcgcgcgggcaagcgccggagcatcgttgatgccatcgccgaccattgccaccgtatagccttgcgcctgcagtttcgcgatttcgtccgccttgttttccgggcgcactcccgcgatcacgttgctgacgccaacttgatcggccacggcatgcgccgtcgtttcgttgtctccagtgagcatcaccacgttgacgccacgcgatttcaaagctgcgatggcctgttgcgaatcggctttcaccgtatccgcaacggccacgattcccgcaagctcgccgtcgattgctgcgagcatcggcgttttcccttccgccgatagccgttccatagcctcgataatggcatcgagatcctcgttgccgacgctcggcatggccacgtcaagatcgtcgatcagatcggtattgccgaccgcaacgttgtacattgcggtttcgggagaagatatggatgattcgaaggtcacggaagatgcagaggattcgtcagctgcaacagtcggattatttgcagatattaacggcaacgcgacgtgcgcagtgacgccccgaccggaaatcgcacggaattgcgtggtctcgcctaacgtaagatgcttctcttgcgctccggcaacaatcgcggcggcaagaggatgttcggaatcccgttcggcactggctgtgatcgccagcaaagcatccggcattttgcgccattttccaagcggaagcacgtcggtcaacgatggctttccagcggtgatcgtgcctgttttgtcaagtacgacagcattgattttgccgcaggtttccaacgcttcggcggaacggatcagcacgcccatctgcgcggcacgaccggtcgaaaccgttacggaaagcggcgtggcaagacccaaagcgcacgggcatgcgatcagcagcaccgaaaccgccgccaccagcgcatgcaccacgcgcggttccggtccgaacgcaaaccacaacgcgcacgaccatacggcgatcagcaccacaatcggcacgaaaatgcctgaaatcttatccgccatgcgctgtaccggagctttggaactttgcgcggattgcaccaatccgataatctgcgcgagcaccgtgtctttgccgactttcgtggcacgataccgcagcgatccagtgccattgatggtggcgccggtcacggaactgccggcctgcttcaccacaggcatggattcgccggtaatcatggattcgtcaacagccgacgaaccagcaataaccacaccgtcaacaggaagttgttcgccggggcgaatcgcaataatatctccgaccgccacctgctcgaccggaatttcctcttcaatttcacctcgtaccacgcgagcgtttttcggctgcaatcccgccaacgcgcgcatggcctctccagtaccgacacgagcgcgcgcttcaagcaattggccgaccagcatcagcgtaataaccacaccaaccgcttcaaaatacggttcgcgagcattctcaggcagaatctgcggaataaacgtgaccacgcacgagtaggcaaacgcacatacggtacccagactgaccagcgcattcatttccggcgaacggtgaataatcgccgcgaaaccactgcggaaaatcggtaatgcggcatagcacatcaccggcagcatcagcacaaattgcacccaattcggcatcggatacagcatcaacatcgtcgaaccgaatactggaatcgtaacgatggctgacacaataagacgcgcaatcagcgttcgcatctcacgagattcggaagaatcgtttgacgaatcagaagaatctgaagaaatattggaagattcagcggattcatacgatttttcatcaacaacagtttgttgcgattgcatatgaacgtgagattcagcagtattcgtgctctcttccgattccgaatgttctttcggcattgcggcatgatgttttcccggcaccacccgtaatgtgccatgcagcatgttcatgccgcatgcgaaaccgtactcccccggttcgttagggtgaagcgtcaatgtcgttgtgcggaaagcgggcaatgccaggtcgacaccgaaatcggagaacaccacgtgcgacgagcattcaccgtcttctttgcgatcgaatatcaatcgcaatggcaaaccggcctcagcttcgatgattgccggactatacccacctttgacttcgacaaccgcctcttgcacgccgttatcgacacgagcgcgaaatgctttgcgcggcgcgaagaagaaccataacacggctgccgtcacaatgaacgcgacaatgacggcaatcaaagcctgcatattctcaccaaccttattcacgttcacgtctcaatgactatcatcacaatatacccctatagggtatatttgcaagagaaaagcgatatcttcagcggtaagatcaagatttcagcgttacgaggagcagcatcatgaacgcaacccatcacggatacgcggacgaccagaagaaaatcatcgcgcgcctcaaccgcattgaagggcaagtgcgaggcatacgccaaatgacggaaaacggcgaatactgcatcgacatcctgacgcagatatcagccgtgaacagtgcgttgaaatcggtagcgctgctgctcgtcgacgatcatctcaaccactgtgtcaaagaagccatcgaagagggcggggaagtttccgaagcgaaaatcgccgaggcaagcgcggccatagcacgcctcgtgaaatcgtagaccgcaaaacatgtcaatccccgatccagcaagcgaaaactcaccatcgccgccaaatcggggattgtatgatcagaccggaaaagttccagaccccatagatttacgaggtagatttacaggtcgaggaagttgtcgaggccgacggtcacgcctgggtatgcgccggtggagaccttgcgtacggccagcagcacgcccggcatgaaggagatgcggtcgaagctgtcggcacgaatggtcagctgctcgccgtcattaccgaacagggcctcctcatgggcgttaagaccgcgcagacgtacggcgtgcacgtgaatgccgtcaaccacctggccacgggagccgccatcggtttcggtggcatccggcacagggccaagacctgcggccttgcgggctgcggcgatgccctgcgcggtgtggaatgcggtgccggacggagcatccaccttgttcgggtgatgcagctcgatcacttcagcggattcgaagtacggagccgcaaccttggcgaaatagtcggcgagcacggcggaaatggcgaaattcggcgcaatgaacacactctggccctcgcgaggcgcggcagcgagcgcggcacgcacctgatcgagcttctcgtcggtccagccggtggtacccaccaccacgtcgacaccttgcgccacgagtgcgagcacattgtcaagagacacgctcggcacggtgaactccaccaccacgtcagtgttgccgggggtgatttgggtgaggtcgtcgccggcgtcaagcgcgagcgccaattcggtgtcggccgcgttgttcacggcatcgaccacatgggaacccatacgtcctttggcgccaactacagaaaccttgatcattgcagctccttcaagcatgtcgcacgtacgagcgtacgaacagcatttcaaatcagtctcactcattctactgaggaatgttccatttacgaatgtaaagagacgcttcgacgcgtcaccgcccagccgatcaaggcgaacggaatcgaagcgagcacgaaaatccatggcagcatcagacttatgtctgggctgaaatggtcgagcatgattcccgtggtcatcgaaccgaatgacgcgccgatggttcccgcggtgctcacccacgcgaggccttcggtcagcgattcctccggcacggtctccttcataacgagattgcccgaagcgaacaccgacgaaacggtaagacccgtaaggatttcaaacactcccatcataatcagattgccttggcacatgtgaatgatgaagaagcctaccgttatgatcgcgaggaacgtgatcatatggcgccagcgggagcccttcagctcgcgcgtgccgaaaaccagcgcgcctatgcacgagccgaccgccaacatcgcaagctgcacaccaagcagggaatcaagatgcaacgctttcataacggccgtcatcgacgtatcgaatgcggtgaaactcatgttgaacacgatgaataccatcaaaagcggaatcacgcccgcataggtgagcacattgcgtttcttgcgattgtcattcgacttcaactgcgcgacggtcagtttgtcttgttgtttgtcttgttgcacggaatttgcgccgccattatttccagtattgccgtcaaccgccaatcgcacgtccgcatcgtcggaagatgccgaaacaacagtgatttcacgtactaccggcggttgcgtgtcacgcaatgcgaagaacaccgtgccgccgatcgcgcacgcaatcgtcggcacaaacaactgcgaaacgggatgcacggaagccgccaggaacgcggccagaatcggtccgaaaatgaatacgatctcatcgatggcggattccaatgcatacgcagtgttcagcaatgagccgttgccggtacggtcaagcacatacgtccaacgggtacgcacaagcgcgccgaacgagaattgcgtgagccccatcaccacagccaaggcgaacagcagtggaatcggcacgcgcaccaatgccgcgaacgcaaagccaagcatggcgatgatttgcacgacaagcactaccgatccgaccttgcgctggccgaatcggtcgaacagtcgtgcgtacagtggcgtgaccgccgccgtggaaagcacatatgccgcgctcatcacgcctgcgatcgtccaattgtcatacaaatggttgagtgcgaggataatgccaaggctcatcatcgacatcggcagtcgcgccaaggctccggaagcacagaacgctttggttcccggaatggagaacagtacggaatatggcgacttcgggatttcggttgcgctggtggcagccatgattatcgctccttaactttcgttgcgtccggcacgtgtgcccgcccacacatgctgcacgagggtagcggcgctcctccacaacgctgcccatagtgcgttaccctacgggcaggctggaaagcgccgcacgttcggcgcaccagcactagtcgttgtcggattgttccggaattccgtagctcaactcggcaaggatctcttcttctgttttgtcggcggcattgagctgtcgatcgccctcaatgggttcactcagatagtagaggcaggcgtcgatagcggtaagcggtacaccctccattgccgacagcaagatacgatacatatccaactgtgctaattttttctgaatttcctcttttttgcgaggtttttttccagttttccaatcgacaatagtatattgtttcgaccgatccaccccatcgagacccccgaagaacaccgcgtcgagcttgccgttgacgatggtgcccaattgcggcacgttgacgacgatttgccgttccgcccacgcgggcttgcgccgtgcccatgtcgacgttgcgagacgctgttgccaatcgaatatcccgttattgtctgccccattatcgtcttgattgtcttgcgattgcgccgcattgttgcgtcgcagctcggcaagcatcgccaatcgcgattcagctacgcgagtaccgccattgccgctcgcgccaacgccaatgccggcatcattcgcatcggccatgatgaaccgttccgcccaagcatggaactgcgtgcccagttgcgcggccggagacgctacgttcggtatcggacgcaccagcccacgccagtaagtgcgggcgccacgctcgtccatcatgcctgcgcgcgcctgcagcgaggtgacgttctgacgacctgacgcaagaatcctctcgcccttcgcacgcaccgcgctgtcgaacgcatcctgcgacgcctctccaagcatgtcaggcatgagattgctgtcggccaccagcaattgcgcgcatcgcagcagcgaagcacccgtattttcgcaacgcccagcaccttcgccaccgacaggctcgccaacttgcccgctggcccgttcgccagcccgcccatcagtctgcccgccagcattgttcatcgccgaatccacctgcaacgcagacaaacgcaacgtctgcagggtctcatcgctcaactcgcacggccatggcaggaactggttgccttccgacggctcgagcggcgcattccaagcgtcgccgaccaccgcatcttcaaaatcgcgggcatgctcgcccacaaaaaatccatccggcaacggcgcatcgatcgaatgcagactggtcatgccgttttcggaggaatcgacatcctcaacttccgcaatatcggctaggttgctcggctcagccgctctggaaacgatattgagcatggaatcgcgcacttccactaggaaattcgacggtttggacacacgtttgcgatcgcccacggcacgcggatcacggctttccgcattcgttgcgctgcaggtgagcagcgcctcatgacgggcgcgagtcaacgccacatacgcgaggcgacgctcgtcggcatgcaaccgacggccatactcctcgatttgcgtcaaatacagtccgtccgaatcaataccttccatgtcatcgacgctcatattccgcaaggtgccgaacacttcgtcgtcaatgatttccgcatcctccagcatttccaacgcttccaacggatttccacccacaagcgcgtcatgggggaatcgcggcagaatatcggcgtccacacgcaccggaaccggcaccgcagcaggatcggtcagccacgttttggcggtctcatgatattcgggcggcgtccacacgccatcctggaaaccgttgagatgctcttcatcaacgaccacacgcagatcgctgcccttgttggtggggaatccgccatcggtcatgccgaccacggccacggcatcccattcaaggcccttcgactggtgtacggtcatcagcaccacgtcgacaggcacatcgggagccaccgcgttctcctcgcgtgcgtcgcgcagcgaatccgcccatgagatgaacgcgcgcaggctcggcgttccctgcgacgcgatctcctgcatatacgtgtcgacgagcttcagcaacgcatcgatcggcgatttggcgagcgccacccgggatgcggcgagcgtggcatcggcctgaccgccgcgcatatgctcggccagctgcatgtcgatatcgagattcaatgcgacgatggcctcacgaaccacttccggcaacgggtggccaagcatgcgctgcacctgacggatcgcatccgcggcgcgaagcacttccttcgtcccttcacgactcaccctgccgtcaatgagttccgcgagatcgtcacgcaacatgaggtccacaaggaaaaccgcattcggcacttgatctcgatattcacgtacgatggcacggatttcagcatcggaaggacccgacttgggagttactccataaattcccagattttccggtttttcttccttgttggattgctcctgcacgattccagctgaaacaagcgcacgataccggcacatcgtgttcacctgttccgcggtatcggcgagcgcctgcagatcgttggcgctgatggagaatcgcggcgtggccagcaatcgcataagcgccgcactgtcggtatgatcgctgacgacgcgtagcaaagcgaacacgtcctgcaccgccgggcgttccagcaacgccgaccgccccactaccagcgtggtcaggcctgcgcgttcgagcgcttccgcgaattgcgacatgattcctttggaacggaacagcaccgccacgtgcggacgattgtctttcatgccattgtcgaggtcgcgcgaggaaggcgtgtgcagggcgatcgcatgtttggcgaagcgcacgaccgcgtcgatctcctgcccgaacgtgtcgaacgcaagcacgcccaccgttccttcgggggcttcgtcggtattgacgagcgccggaacgtcgacttcgcgcatcagcgagctgctgaggcgtctggcaggcaagcggagcggtttggtgagattgttcgccgcttcgagcaccatgcgtgagttgcgccgcgtcacggtcaatgcgaatggcctgctggtggcgtccatgccgaaatcgtgttgcagcatgcggaatgcgccaggactcgcccctcgccatgcgtagatcgattggaaggggtcgccgaccgcgttgaccgcgctgcgatgcgtgtcgtcagcgtggaacagcgcgctcagcagtgccgcctgcgtggtggacgtgtcttggtattcgtcgaggagcacatgcgaatagcgtttgcggtaggccgctccgatggacgggaatcgggagacaagctggaatgccgcgatggtgaaatcgctgaattccgccatattgcaggcgcgtttttcggcatgatagtcaagcacaagatcgagcagcaggtcgcgttgcttggcgacgaatgcgagttgcgcgctgttgaacacgcacatgtcgtgcccgagttcgcggtatttctccagtttcttttcgtagtccgcgtcggaatcctttttcagtcgtttcggcagctttggcgatttcggctcttccgttggcacggtttcgccgtcaagcgccttggcgatctgttcgacgaacgcctcatcccagtcgcgcacgcgttgcacggcttcgtcgaagctggtgcagtcgccgccgatcatggcgccggaaatggcgttggacagggcgaacacgttgcccgctatggtgttgaacgatttcagatcgccgtcgaacgccataagatcatccatatgcctgtcaagcacggtgtggatgagctgcatggcacctgcttcgctcaatggctgcgtgttctggtcaaagccgacaagcagtccatattggcgcacgatggattggaagaaagcgtcgtacgtggagacttccggtttgaggaacgtcatgttcgctgatttcaggccgcgttcgcgctggtcgcgagtcacggccgcagacactcgagacaatagttccgaggccgctttgcgcgtgaaggtcagtccgaggatcttttcggggctcaccccctgttcgatcagcgtgatgatgcgtctggtcatcgtgtaggttttgccggatccagcgccggccaccaccaccacatccgcatacgagggcgcttggacgacggcagcctgctcaggactgtcggtgaacttcatggttccgctcatgccgttctcctttcgaatacggtgttctgttcgcccgcacaggccgggcagatcgtagtgtttctgcagtatctcacatgttccgtcgtcggtcttgcggtgatttcgttcgccctgctggccgcggccgcatagaagaccctcgcgatcatggtgagggaccataccgccatcgtgccgcgtaagccaaggagctcattccaatgctcgtcgctcacttccaacggaggaagcatgtcatcgagtccgtcgtggaaatccttgtcgagttttttgacgtaatagcgcggtatgaattcgccggtattgagacttccattggcgaacagcgcctgctgcatatgcgattcggcggcggtgtcgccatacggcgcagggtatgcgtgcttggctacatggaatagcgcgctttgcgtgatgttcggcgcgttcgccaccgcctgcgccccgcgcatgccgctttcctcggggaatacgagtcccagctgatagcagacgagctgcagatcgttgaacaggccttcgccggtcggactgacaccggttttgtagtcgatcagacgcacctgctgcgtgccatccgccatttcacgccgttccaaacggtcgatcctgccggtcaaacgcacggtgagatactcgctcatgccggtttccggccatcctccgaccaacgctcccataatggcgatcaattcgttccgtgaaatcgcgtgaacgccgtccatcgcattgtaggcgtcgagaatatcgtcgaaatcgaattttgcggtaaatttcagctcaggttcggctttcgtaagttttccaacgctgaatgcatcattatttttaatcggataatcaccatgattcgattgcacgaaatacgtggcgatgttacgcaacgcctcctgcgcctgctcatctttcttcaacgcctgataccgttgcgcgggatcggcaatggcgttgaaatcgccgcatagacgcttgtattcggcatacatccattcggtgatcgcattgatattgtccacgtcgctgatggcggtatggtgttccggcatatcaagtccggcttcggtggcctgttgcgccaccttgtggatcagcgagccgaaactcgtggcgacgctgcccatgcgcgggccggagaagcggttttccaacatccaacacaccgggcacgcccacagattgtctaccgcagaaggagacaaagtcaccacgtcggatcgccgcgatttaccgtttcggcccgacgtcgagctttccgacgtgtcgctcatgcccgtccgcatgacggccgcgatcttccgcatggtggcctcgaccgtctcccccataaacggccaacggtcagggtcggccgccgtaacaccatgcgaagccagcaatgccaacgcttccgcggcatcacgcgccttcgggctgtcctcaggttccgacgcaagcacgcttcgggcggccgcgaccagaccacggggatcggtttccagccccgcgtaatcgccttggccgccgaccgacgcatattctcgccgttccatatcggcgtcgcgatcgcggtcgaagcactccggcatatatccgtatagaaaatccgaaggcacattgtcgtcattcagcacggcgctcaccaccacacgctcgctggcacgggtcaacgccaccaacaggctcttctgctcggaggcgagcaccgacgccagttgcgcgtcctgcctgcccgccggagtgacgatcgtgtcggacaatacgccgtgcaacatcacatcggccagttcctcaccgccgaacaacgtgttgcgtggtgtgagattcggccactgcccctgctgcaaagccggcagaaaaaccagattccagcgctttcccgccgctcctgcgggagtcgtcagggtcaccgcctgatcaatgggcgcggtatgcgccagcgaatccgcctcaatggtcagcaaacgcacctgttcgatgaacgcctcgatggtgtgtaccgcgaattccccgcttgactcgccgcctgaagcatagttgaacaaacgcatcgccgcgtcaagccgatcattcgcggcacggccggcagccgaatgctccagcgccacacgctgccagacttccgccttgccgcaggccctccatgcgcaatccaacacatattgcggttcacgcgaaaccagtttgacttccgactcgcatgttttgtcaagaaccttccacaatgatgcgaacgccttgatctgcggatccgcgcccagcacggaggcgatcgcatcgaccacgcgatcggtattgccctccataagaagcacgtacagcgcttccatactcagcgcgaaatcgccttcatgctcgtcttcatgctcactatcatgctcgccatcggcgcgaatcgcatgatagtccgtcatataatcgcgccaatcttccatcaaacgagggagcaacgcctgttgttcgacggcagcgtccgccgcatcctcatcatcttcgaaatcatcttcgtcgtattcttcggcagcatcctcatcatggttcgcagccttgctttccacaatcgaagcgagcgaaaccaacgcgttcatcgcggattcgatggatgcgagacgggccggacgcccctcatgccgttgatcaccaccgaccgtaatcagcggagatcccataatcagcgccacgcgcgaacgaatataggatccggcggtctgcaggtccatggtcgaagccgcgatcgtctggtttttcaattcggccaactcgatcaacgcgaacagaccctgcacgaacggctcatccttcaacggccgggtcacgctggaatagcgcacgggaacgccgtcagcgcgcaaccgctcgccgaatgcgcgcacggtggcattgtcgtgcgcgatcacggccatgtcgttccatacacgggaacgttgcaaatgctcagttttgatcttccacaccacgtcgtcgagctcttcggaagaggaacggtacaaggccgtttccacactgccgtcggccggcgtgacacgagcgcccgtatcgtcggccggcaacgtttcgatgggcatcgcgcctggcatatcgctcattttgccgggacgatcgggcagaggcacgtccgtcgactccgtgcttgcgatcgacaggctcactcgcgtcgcgacaagcgtgcgatagtcgccatgcacgccttgctggttcgacacggtttgcgcggtatcgccttcgtgcgccgtttgcagaccttcgatgcgttcaagcctcgctcccatgcgcgtctgcgcctggttgaacagatattccggatatgatcctcggaacgtctgcacggcttcgtcgggattgccaaccaacagcaggcgcaccccgcgttcatgcagggcttcaagcagtgcgaaaccagccaacgtcgtatcttgaaaatcgtcaacgatcagcatgttcgcaatatcggcttcctgtatgccagacacggcttcggtggcgtcgatcatcagctgcgacgcgtcgagacgatattcgccaggataagacgaacggatcgcctcattgtattcctcacgcaaggcgaaggcgagacgccattgagtgcgcaggcgttcgcgacgttcgtcaagcatgccgtccctgctggccgcacgggcgatcagcatgtcttcgaactgcggtttcgcgccaatctcgttcatgcgtgcgagcatgtcgcgcaattggttggcgaatgcgtcggtggaatcgtcggccaccagtcctgaccattcggaaaccgcgaaataggtgcgcagcagatcgcaggtggcgcaatcgtcgccatgttgcctatgctccacatgcgaagccagtaccttgcggatgatcacatcctgttccgcaccgttcaacagtttcggcaacggttcgccttgacttgatctcacggccgtcagcagacggaatgcgacggcaggcaacgtagtgaccggtcgcgcctgcgacacggccgacaattcgcggatcgcccgatcgcccaacgcatcggcgatctgcctgccagacaccgtcatcacggcattcccgtcaccataccgcctcattgcggcaaccagcatgcccagcgcaaactcggtttttccactgctcggcgcgcccgcaaccaacgtgacgcggccaaggtcttccaaattcatcatgcctcccaacactactagtctcgtcctcctttacctgacaaatccggaacctgcaaagttgtctcgaagccaacctttatccaacacaatctgcggtgcaaccactccttcgtggcatctgcagcaacgccgacaacacatcaatggtcatttccatttgagccagatgcccgtcatccagcaactgaatgtatgtaccctcatcgtcgccacgaaggccgtctcttaaggttcgcacgttctttctatcactacgacttctattattcagccacaacatgtctcagatgcccgtctttgtatatggacattttgaccccttgctgataggtttctgggttggtcttcagttaggataggatccagagagagcggccgaaaagcatacgcaccacgaggaaagagagcatatggaagccatgaacggcattccccctcaaatccctgggtatacattcgcccaaaagttgggttcaggttccgaagcgaacgtgtatttgtaccagcagctttcccccagccgacaagtggccatcaaggtcagcaagggaacgctcgatccacgcgcggcggcgcggttccgttccgaagcgaacttcatgggcaggatctcctcgcatccctacattctttcggtgtacgaaagcggcgtcaccaccacgggcaacggctacaccgtgttcgaatacgctccgggaggcaattacaagaccttcctggaatccaacaggctcaacgcagaccagatgctcaccgtcggcatcaatctggcgagcgccctttccacggcgcaccgcgaaggcatcatccaccgcgacatcaagcccagcaatattctcatcaacacgcatggcatgcccatgctttccgatttcggcatcgcgggaacgatctacgggcgtcccggcatcggctacaccatcgcgtgggctccgccggaagtgcttgcaaagaacggcggaggcaacgaatcctccgatatttattcgctgggagcaacgctgttcgccatgctgacgggccagtcgccatatgaatacggctattccgcggccctcggctcgaccaggggcaaagaacgcggtgctctgctgagaaacatcattctcaccgatccgctccctaagctcaataggccggatattcccccgcaagtggagcggatcttgcgcaaggcgttgaataaaacgccggaagaccggtattattccgcatatgatttcgcgcgtgacatgcagcgtgcgcagcaggaattgtatggccatgccacgccgaccacggtcgaaggcgaaccgccgttcccgcaaaatctgtacgcacagtcccaggcgaacattcaggtttcaccgaccgtcccaaagcagcgcagcacttgggccaagcctcttgcgatcgtcgtttcggcggttgccgcgatcacggccgtcgcgttggtgttcgcgtatgtgatcttgccgaatatggattcggcttccgacaatagcagcgtgcagatcgagaatccgggaacgcacgatcaggacaacgattcgcctgattcggccatcaccacaagtagcgtgcccagtgtcgagaatctggccggctcatattccgccgatggcagcagcgtgcagttcacatgggtgaaccccgaccctcaggacggcgattcgtacgcatggtcgctggtaggcgatgcaggagtagacccgaacgcccaaggaaccaccaccaccgacacgcacatcagcatcaaacccgccgacggctcgcagacctgcatccaggtgagcctcatccgagcggaccggcagatgtcgcagaatcctgcgatcgcgtgcgcggccaaaccataagcatcacagcacttcccaacagggtcggccgacggcattattccatcgcaggcgatgtccggaacgaacacaacgaccatcggaacactcaaggaagaaccgaaaatggacaaacgcaagaacgcagccgatcagccggcacaatcgcacgaacgtcaattgcgcttcggatcgatgatgcgcaaactgctgttgccgtcgggaagcagacggtggatcacgccgatcgtcatgctgcttctgctgctgggtatcatcgcaggcgcgttcatcgtcagttcggtgacgcaacggcatgtgcaacttgacgacggcaccgtgtggatcacgtcgctgaaggaccgcaaagccgcacgattcaatgcgaagaacaaggatgtggacgccggagtctcatccgcagcctcccgtttcgacgtggcacagcatgatggcgacacagtgatctccgaaggcaccaaggccagcaatatcgcggcttccaccattagcgaaaccggcaacaccgccatcaaaacggatatcgaaaccattgtcggaggcaataccgcagcgttcatcaacaccaaaaccggcaatgtgtgggtgggatccgctgccgatgtgaaatccgtcaaccccaccaccgacaagccgaacatgaaactgggatccggcggaaaaatcgcggtgacgcatgacggaaccgtatacggataccgaacttccgatggcgcggtgctgagcatcaaagggccgcaagacacgcgcgagcaagttggcacgataggaggcgcaccgcatgccgaatcgttcaccgtcatcggcgaaaccccggtcgtggcggcaaaaggcaccgtgtattggccgcagggaagcgcagccatcaatctgcagggcagcatgaccttgcaggccccttccacggacggcaagcaaaacggatgggtggccgtggcgacgccgcgcgggctcgcaacggtggatctcaacaccaaaaagaccgcggaaacaacgaattccggcaagggcgagcccgcccagccggtatccacaggcggatgcgtattcgccgcatgggcgcagaaagccaacaattacgccaaagtatgctccgtcgacagttcggacatgacattcgacaccctgaccaacatcaacgccacttcggaactgatattccgcaccaaccatcgtctggtcatactcaacgacgtggtcaacggcaacgtctggaatccgcaggaatccaccaaagtcatcaaaatccaatggaacaaggtggaaaccaaacagtcgaagcaacaggaacagaacaacgacagcgccaacaaccagcataatttcagcaagacctgctcgtcgcaatccggccagatcaaagccgaagatgattcgttcggcgcgagaacaggatcgcagcagatcctcgacgtgctccgcaacgacgaacagaccgactgctccgtactgcgcatcacctcggtaagcgcccccgacggcgccaacatcagcgtttcccccgtatacgacggacgatatctgcagctcgacgcttccgcggcatccgaaggatccgtatcgttcagctatgaaatctccgacggacgcgggcaaacctccaacgccaacgtaagcctcacactggtaggcggggacgacaacgcgccccagcaaaccgatacgccaccggaaatcgacgtggaacaaggagcgacctacaccaccaacgcgctgggcagcttctccgatcccgacggcgacccgctcaccctcgtatccgcaaccccgcagaacaccgaccaggtgaccgtttccacgcgagccgacgggcagctcgtgttcaacgcgggatccatgtcttccggacgcgccggcatcgaagtgaccgtttccgacggccagcagaccggcaccggcatggtgtatttctcagtgaaaccggccaacacgctggccgcggtgatcgatccggccgtcaagcagaccacgccagacacccgcaccaccatcgcgctcaaacaatacgtgcatggcacctcggccgaacccgcgcagctgaccgccgtggaaaccccatccggcgcatccaccaccatgaacgccaccgatatgtcgttcaccttcagcgcatccaaccccggcacctactacgtgccctacaccatcacacaaggatccatcccctcgaccggcctggcccgcatcgaagtgcaggcggtgaccggagactccgccaagcccatcgcagccaacgacgtggcactgctcggcgccgacaacaccgcaatcgtggaaccactgtctaacgacgtcgacccgatgggtggtgtgctatccgtgaccagcatgaccgccgatgcggcgagcggcatcaaaaccggcgtcgtaggcaacaagcgcgtctacatcaccgcacggcaggtaccgaccgagcccgtgcagatcaaatacagcgtcgccaacgcggcaggcacgtcaaccggcgtgatcgtgctgcagccaccggcactgaccacctccaactccgtgccgaaagccgacaacatcaccacgcaggtacgcaccgacggcatcgtctccatcgacgtgctcgaccacgtgacctactccgacggcaccacggtaagcctgcaaaacgacctgcaatacgacaaaaacacgttcaaaggactcgtattcgtatcaggcaacaccgtacgataccaagcatccgaccaaaccggatccttccccgtaacgtacaccgtcaaagacaatctcggcaacgcggcatccgccacaatcaccatcaacgtgcatcaaaaagacgcttccaacaaggctgcgccaacaccatccgacgtcgaggcgcaagttgcggccggccaaaaagtccagatcccgatcaccttgaccggcatcgacgccgacggcgacgacgtgcagctgctcggtctcggcaacaaggcgccgacactcggacgcatcagcgaagtcggcgccacctacctggtatacgaagcctatgccgactccacaggaacggacaccttctcatacgccgtcgaagactggaccggccaacgatcccaagcgcaaatccgcgtaggcgtattcacatccggcaccgactcgggcgtatacgcgcgcgacgacgaaatcacattgcgccccaacaccgcagcaaccgtgcccgtggcgcaaaacgacatctccggagacaacaccgacctggccgtcagcgaaaacgtcgaatcgcaagacatcagcaatgtgaccgtggcggacaatgcgctcgccttcaccactcctcagcaggcgggcacctattacgtggtgtatacggtcaaagacaaggcaggattgtccgacaccgcgacattgacggtgaacgtggacgacaacgccaccatcgaaccgccgacagcatacgactaccgtgtgccatcttccgcgacgatcgataagaaatccatcgacgtggacgtttcgcaatggatcgcgaatccttccggcagcgccgacgaactgcacgtggccgttgatgattcggctaccgaccatgcgcatgtcaagggcggagacaagtccacgaccattaccgtggacttgacggacgaggcgcgagccgtgccgtacaccgtgaccaacacgacgtataacatcacgtccacggcgttcatccaagtgcccgcgtacggcgtgttcccgccgacccttcgaccgaaggcgccggctttgaaggtgaacgcacgcgagacgatcaccatcaatatcgccgattacgtgcgtgtgggcgcaggcaagaccgcgtatgtggacggcgccgattcggtgagcgccacgaaggccgcggacggcgacctgtatgtgaacgaccagacgttgaagttcaccgcgccgaaggattactccggtcccgcgtccatcaccttcaccgcggtggatggcaagcgcgacaagaacgacaaggtgaaaatcatcaattcggcggtgttgacgttgccgatcaccgtgatcggacgtgacatgcccgcgccgacgttctcctcgtccaccattgacgtggtcgccggcgaaagcgccaccaccatcgatctgaccgcgttgacccattcggcgtccgacctgtacgacgatgagaagcagtacacgtattcgggtggcaccgattccgaccaggtgagcgccaaggtgagttcgaacggcaagctgaccgtgtccgccgacaagaccgcttcgccgggaacaacggtgagcgtgccgatttcgattcaatattcgaagggcacggtgagtgcgggcgtcacggttcgtgtgacggcctccaacaggcctttggcgcgcatcaacgcgaaaaccgtgaaggtcaaggcgggatccagtgaggaagtgaacctgctgtccgatgcgtataatccgttccccgattccgcattgaccgtgaccggatgcacgtccgatggcgcgtcgaagctgaccgtggactgcccgtccaacggtgtggtgtcgatcagcgcctcgtccgatatcggcgcgagcaccaacaaggtgatcgtcaacgtgcgcgatgccaccaatacgaaggaacgtgaggtgacgggcaccatcaacgtttcggtgatggacaagccggatgcgccgctgctctcccccatcgccggagacccgcaggatggcgcggtgaatctgagttgggcggccggctcttcgaacggcagtccgatcagcgaatacaaggtgtcgtggggcggcgacggttccggcgagaaatcgtgcggatccgtgacctcctgccaaatcaccggcttgaagaacggcaagacgtactcgttcaaggtgcaggccaagaatgaggtcggctggtcgaaggagtcgaatggcgtggaaggcacgcctgacaagcttccggacgcgccgaccgatgtgaaggccgaagctagcaagaacaccatcactgtcacatggaaggctttggagggtaatttctccgccgtcgacaagtatcaggcgacgttgagcggtccgaatgtggcgaatccggtccaggaagtcactggcaccagcatcacgttcaaattcgacgacaatgcgatcaccgacggcgcatcctataccgccacggtcaaggcgcataacaaagtgaactggagccagccctccacggcatccaatgccgtttcgccttggggtacgcctgacaatccgactatttccgccgatcaatcaggcgacaagatcgtggtgagaggacggatcaatgacgcacgtaactcgaaataccagtcgattacggtaagcatcgagggcgaagacaaatccgtggagacaagcgccaaggattattccgtcgaattcgacattaagaacgagtggtactacagaaaacttaagccgacgattaccgtggttacggaacgcagtggctcattgcgcaacgaagcgtccgtttcgactttcacagcagtcgatcctccaaccaatgtgaagctggaactcaacaacaacacatgtgtggcgacctggtccagaaaaggtggacgcgtcacaggtttcgttgtaaaggccaagggttattacgatgatgatgttcatgagagcagagccgaatggccgctttccggtgattggagcacctgcgatacggtaagcgtgcaacagtacttcatcgacacctcacatctcagcgacccagcaatcgctaccgataataccgtcggcaacaaaaagccagcggaaatcacactgccatcctcattgacgtgggatacacagaacgccaacatcattcatgtcaatggcggtagttgggaggcccacgggcgaagtgtcaaaggccagatcgtcatcactccggcaggggaaagctcgcatacctacgattggccagctaacggcacactggatgtttccgacatcaccagtccttccggtaccagatgcgattgggaggttcgcgtgatcaccactgccggggaaccagaaatcaatgcgaccaagaaaagctctgatcccgtgaccggagtccgatacgagaagaaacccccgatccggaaccgggaccaacccctgataatggagagacgcaatcctcgatagacaccaatgcttcagccatctcattacgaacagggttggcaggaaaacaggcgcgaggcatctcattcaccgtcaaataagcaaattcaacatcacaaccaatcatcaatacgatcaatagaagcaaccaaggagtacctatgagcaacgaaaacgacgacgccacccagctgggttccattgggcgccatatgagcaagccgcaacagcccggcaatccgcaggcacgccccgcattccaagctccaagcctgccgacgcatccgcaggaacaggacggagacgaagagggcacggtactcagcacgcataacgctacccactacgccgccaacacgttcgacgccgacgaggagggcacggtactcagcacgcataacgcaactcctttcaggccggcgaggcctacggttccaatggcgcagcccatgcaggcgcaaccgacgcaatccgctccaacacaacagccgctaccacaatcgcaatcggctcccgtaatggcaacgcgccaattcccgcagactacggcaccaagcgtcaagcccgcgcagccggccatggcttcttccatgatgtccgcgccgcaggccgacatcaccgaattccatgaactgttcgcccaactggtcggcaacgtctcccaagtcgtggtcggcaaggaacagccgatccgccaatgcgccaccgccatgatcgtcggtggccacattctgctcgaagacaatccggggaccggcaaaacgcagctggcccgcggcctcgccaactccatcgacatgtcgttcaaacgtatccagttcactccggatctgctgccgtccgacgtggtcggcgtaacctactacgaccagaagaacggcgaattcgaataccgcgaaggtccgattttcgcatccatcgtgctcgccgacgaaatcaaccgagcctcgccaaaaacgcagtccgcactgctcgaggtcatggaagagcagaaagtcaccgtcgacggcgaaacccatgcggtaccgcagccgttcatggtcatcgccactcagaaccccatcgaacaactcggcacctacaaactgcctgaggcgcagatggaccgtttcctcatcaaaacaaccatcggctatccgagccatgacgtaagcgtgaacatcctcaagcaggtcaacgtcatcgaccgtgcctccaccgtacatgcggtgctcaccggcaacgacgtgctgcgcatgcgcgccatcagcgaaaccgtgcgtctcgacgacgcgatcatcgaatacatcgtgcgcttggtggaagcgacgcgccacaacgaacgcatccaagtcggatcgtccatgcgaggcgcgctcgcactgacccgatgcgcccgcgtgtgggccgcgtccagcaatcgcggatacgtggtgcccgacgatgtgaagcaactggccgtcgccgtgctcgcacaccgcatcacgctcaccgcggaggccacattcgcgggatccacccccgaacagatgatcgaacagatcctcaatgaagtgccttcaccgaccgtgggcgccaccgcctgaaacgcacggcgcagccagccgcgtacggcacggcacacgcaaagcgcacaccccacacgaaacgttcgtaaacccccgaaaggtcaagcatgcgacaatccaaaaccatgcagcgcaggagaaccatgcaacgatccctgcgacgcatcaagcatcgcatcaaacgactggtcacctcatacgtgtcgccgctcggatgggccgtgaccggactcgccatcgcctcactcatagcgttcacaatcctcagctggcatgaactgctgaccatggcgatcgtgttcgcatgcatgatggtcgccgccatcatgctgtcgctcggcaacacgtcgttcaccgccaccatagacgtgtccagcaggcgcgtcaccgtgtcagacacggtgaaagtcgatgtgtgcgtcgacaatccagggcgcacgccaaccacatcagcacgcggcgacctgcccatcggagacagccacgaacgattctccatccccatgctcgccgccggccaatcacgccaaaccaccgtggaattcaccgccgtctcccgcgcggtactgccggtcggccccctgtccatacgcaaaggcgacccattcggactcgtacgacacgaaaagaaacttgtcgacaaaatcaacgtgttcatccacccgaaaaccgttatgctgaacacactcaacgccggaattccgcgagatctcgaaggccagccaagcggcgaaatcgtcgacgacgacctcgatttctacggactgcgtgaatacgagccaggcgacgacgtacgcaacgtgcactggctcagctccgcaaaaacaggcgcactgatgatccgtcaatacgaggcgacccgacgcaccgacaccgcattgaccatcagcgtgaaccccgacgactatgtgagctccgacgaattcgaactggcggtatccgtccatgcctccatcggcgtgcaatgcctgctccaaaaccgaccggtgacctcacacgcgggaaccgaacgcatcatgccacgcaactccacggaattccttgacggctgcagcgccatctcccccgatatcagcgacaatccgaatctggcgcaaaccaccctcgcccacgcccccgactcatcgttctactacatcaccgtcggcaggctcaaaaacatcgacgaaatcaaacacatggcgctcgcactcccccgatccgcaacctgcgtggtactgcaaaccgccatcggacagccacgcgccatcaaacgatacgccgatttcaccctggcgaccgtaggaaacctagacgatctcccaatgatcatgggggtactggaatgagcaccacaggactttccacccacaacaccaacaccggcgacaccggccgcaccaccggattcggcaacaccttcaccggaaccggcaccggctcatgggccgactccacacactccgtcatctggatgtcacgagacggcaaatcacaggcactcccctacctacgccggacacgcgcctcgcaatacgcaagcctgctcgtcgcagccctactcaccctcgccgccgccagcaacctcatcgacgtctacggatcggccacatcctgggcgctcgccgccattccggccaccatcatcggatctctcgtggcgctcgcaggcacggttccggcacttcgtctctggtggcagatgctgttcatggccgtcgcccagctggttgtcggccctgtactgttcctcaacgacaccaccatcgcccatattgttccgaccttgcgcacgcttacacaaggctggatgaacatgctcggatcgttcaaattcattctgtcggtcgaacctcctaccggtaccgccgatggctgtttgctggccgtatggaccatctgcctgtggttcgcgctactgaccggcattttcgcagtgactgaagatggccgattcaccatgatcgccattattcccgttaccgccaatcttgcgatttgcgcgctgctcggctcatcttccggctattaccgcatgttcgtgggcaccataatggcgctcatattggtgatttggatcagcgcacgttggaaattactggaattgggacgttggctcagttccgtcgtgatcgtggtgctttccgtcgcattggcgattggaggatgcctcgtcgtcgatcaggaccgcaccattctgcgcgaccattatgatccgccgcttagcccgtacaattacaccagtccgttaagcggcatgcgctcgtacattacaaacagtaaggacgatgtgctcctcaccgtcgaaaacctgcccgctggatcaagcgtgcgactagcggtcatggaccgtttcgacggcaacgtatggaatctgtccgactccaccatgtcgtcggactcctccaattaccgacgtgtcggcacctccatcaccaacaatgccgaaggcaagaaattcaccgccacattcaccgtggacaaaggactcagcgactactggctgcccatggccggagccgcatccagcgtgacattcgacaacagcgaaaactccgacttgttctactacaacagcgacaccatgtcggccatctacccctcacgcacctccgagggtctcacctacacggaaaccggcatcatgccaacggttcccaccgacaaacagatcgccaaaacagacgcggccgccatcagccagccaaaagccgaagatgtgcccgactgcgtagacaaactcgccacagccatcgccggaggccaatccaaaggcggcgaagcggcccaggccttagccgaaaagctcaaagaatccggttggttctcacacggattaagcggcgactacccgtcaaccgcaggccacggcaactaccgcatcgaccaactgctcgccggaacggccatggtcggagacagtgaacaatacgcctccgccatggcattgatggcacgcagcctaggtcttcccagccgtgtggtactcggattcctgccaaaagacgacgaaggtgaaatcagcgaaagccgcaccgaagaacaaggaacaaccaccatcacgaaattcaccggcaacgacgtgaccgcatgggtggaaatcaaactggactgctacggttgggtggcattctatccaacgccaaaggaaaccaaagtccccgacgaaaaccagaacctcaccccaccgaatccgcaaaccctggtacgccagcccccggtaccactcaccgacccgctacgcgacgacacccaggccaaaggcaagtcctcaatcggcggaagcatggccgacgaaacctcagccaacctgttctggcagcatttcggcagaatcgcaagaaaagtagccatctacggaagccctctatggacgctgctcatcatatgcggtctcctgctcgccatcaaagcgatcgcactggcacgatcaagaaaacacggcagcacgcagcagcgtgtggcagccggctggcaatcggtcgccgcgctcgcacggcaaagcggactcgacattcgaggcacacgcagcgaacaggcggtttcgatcgcgaatcagatggatatttcccgcgagaccttgctcgctttgggcgcgcaagccgattacgcggccttctccggtaatttcgtcaacgaagagcatgtgcagcagtattggcgcgatgttgtacaggaacgcaagtacatgctcaagtcattgccgacgttacgccgatggcgtgccaaactttcgcttgccgacgttttccacttccgcagcaaccgcagcgggcggaacaacggcagcgatcggaagcacaatcgtaagaaaggacgggactcatgatctttcgtagcatcgaggccggcctgaatagcaatgtcgggtgcaaaagaaaaaacaaccaagacaacgctctcgccagccgtggcgtatatgtcgtatgcgatggcatgggcggcggcaaaggcggcgagcgggccagcgcacaggtggcggcatgtttctcgcagcttgccgaacagccgtcgcgcaaccgtacgtccatcgaacatgcgttgagccaatcgcagcaacaggtgctcgaacttggccaggagcttggcggcatcgccggaaccaccatcaccggcgtggtgctgccgactcgcgttgaagatagcgtgcatgaacaagccatcgatgagtactgctacgtcatcaatgtcggagattcacgcacctaccatatgcgcgccgatgcggaaggccattggatggcggagtcgctgacccggatcacacgtgaccattccgaacggcagaacgccatcgacaccggcgaaatgctaccggacgaggcgaaccgatgcataccgcgcaatatcatcacccaatgcgtcggcgctcctgacggcattcagccggactggtatgcggcgcgctccacgggacgtttcatcatctgctcggatggcctgcacgcgcagatcgatcgggaactgctcgccgatgtggcagcctcatatggcgatccgcaagtcgccgcggatatgctggtgcagtccgcgctcgacgcgggcggcaacgacaacgtcaccgtgattgtgcttgatatatgcggcaaatcatcggattattcggcaaatgacgattggaacgtcagcaaaatcgacgatcacgaggatatcggcgatttgcaggaaagcacattgcaaacgttacgtgccgtccaataatgcgcatgttctcgcaatgacaatcgtcaataatcggatttgtcacgttatatcagcgtattcaatacaatatttacagaccacgagataaggagatcatgatggtcgatttcgatgccgcggtggcggccgtgcaggatccgaacgcagatcccgtgtttctggcgaaaatcgcttacgaaaatccggaattcggcgcgaatgtggttgccaatccgcgtgcgtacccaggcctgaagcgttgggtcgcccagttcggcgacgaacgcgcacgtcagcagctggtcgcgatggggtggccggttccgcaggacggaatcatgcagcaggaggccgagacggcttctgaacaggcgcaataccagatgccaagcgagcaggtgcaataccagcagccgcagcaatcatcggaagtgcaatatcaggcgcagcaccagccgccggcaacccagcaatgccagcctgaaccgtttgcggcaacacctgcatcgaatatggcgaacgatgcttcgacggaatacgtcgacccatataccaaccccgcagacctgtctgaagtggctgatttttcgccgattcagccgcaagagccagtcgcgtcgaatgctggtttcaccgcggaattggccatgaccacggaagatcagatgctgatggctgaaatcgcaagcaaagctccggagctgcaccccttccttgcgcgcaatccgcatatctacccggatctgctcaactggcttgccagtctcaatgattccgccatcaacgcagccatccgtctgcgacggtaaccccttggtagaacttggcaaaagcccgacgaaagccgccaaacaaggcctaataaggcctaataaaagccgcttgcattggtaagctttcgtaccataatatgttcgttgcgccgtcatcctcatttatggattgacgacgcaacatgtatcgcggcgcgaaggaaatcagcgctgttcgaaagtgaagaactggtctccgatacgcaccgtgcaaggcgcgtcaagcttcatcggcttgcgttcgaccttgatctcctcattgccttgaatgatgtacgtgccgttgagcgaaccgtaatcctcgttccacaatacgccatcctgatcgaagctgatcgccgcatgattgcgtgagatggtgcgcgtcggatcctccaacttcacgaatttcgcgccttccggcacctcagcggaaggcttgcgtcccagcagcacacccatatcgacgatcacttcctggccggtctgctcgttgtaaagcacatactccagcttcggctgcttcatggtgaatgccgaagacagcaccgtgccatcccagtcgatgtcatcatcgtcattgaccggttcgacgtcggacggttccagcgctgcggcagcctgttccaccggctgtatgttcgccgcatacgattccgcggattcctgcacattttccaatgcttggaatgcttgggattccggtgattcgtatgttggctgcgactgcgcagcctccgccatggcgggctcaacgagagaagacattactgtggcatcatcgtcataccaacctggttcaggtggaggcggatatggaagaaagctcatactttcattgtaatttgccatgcgattttgcgatgaagatatccgctctgcaatacgtacggttccgcaataggctgactgttgtcgtagggatcgcagcaactgcagttccgcattaaaaatagttccgcattaaaaaatggggatcagctgtttccagccaatccccattcatgtattgagatgatttcagacgttatgccattccatcatcgcttttcggatcacagggtgtcgcccaaatccatctgaccgccattgtcgtccaggaagtcatccggattgaagtcgtcgccgagcttcagatctccgaagtcgatgttcgagaagtcgacttcggacagatcggcgtcgccgaaggcggcatcggactcgtcgccacccaaaccgaagttcgggtagatggtgtcgcgaatggccttgtcaggctcgaccacggcgttacggtaacgggcaaggccggtacctgccgggatgagcttaccgatgatgacgttctccttgaggcccttgaggtcatcgaccttctggctcagagcggcttcggtaagcacgcgggtggtctcctggaaggaagccgcggacagccaggaatcggttgccagcgaggccttggtgatgcccatcagctccggacgaccggcagcaggcttgccaccttccttcacggccttcatattggcggccttgaagcgggcctgatccaccagttcacccggaagaaggtcggtatcgccggaatcgatcaccgtgatacgacgcagcatctggtgcacgatgacctcgatgtgcttatcgtggatatccacgccctgggagcggtacacggtgtgcacttcctccacaatgttcacctgggcagcacgcgggccgaggatgcgtaggatcttcttaggatcgacggagccttcgatcagctgggtgccggcttcgacatgatcgccgtccttgaccatcatcggggcgcgacgggtcaccgggtaggcgatcggctcgacggaatcgtcgtccggcttcaggatgacctgacggccgcgctcggtatcttccaccttgaccacgccagcgaactctgcgatcggggcctcacccttcggagtacgggcttcgaaaagctcggtaacacgagggagaccctgggtgatatcggatgcggaagcaacgccaccggagtggaaggaacgcagcgtcagctgggtaccaggctcgccgatggactgtgcggccacgatgccaacggcctcgccgacatccaccagcttgttggtggccagcgaccagccatagcacttggcgcacacgccgcgcttggattcgcaggtaagcacggaacgggccttgacctcttccacgtcgtgggcaacaagatcgttgagcacgtccatggacagcgcgtcaccggccttgtacagcacggtctcgccgtcggcgggatcgatcacgtcggttgcgagcagacgggagtacggaccgccatcggcggccttgaccagatgcaggttgccttcagcatcacgctcgccgaccttcatcgtcaggccacgcttggtgccgcaatcctcttcgcgcacgattacgtcctgggaaacgtccaccagacgacgggtcaggtagccagactctgcggtacgcagtgcggtatcggccagacccttacgtgcaccgtgctgggagatgaagtattccagcacggacaggccgtcacggtagttggacttcaccggtcgaggaatgatctcgcccttcgggttagccacgaggcctcgcatgcctgcgatctggttgatctgcatcatgtttcctcgtgcaccggactgcacgatgatagccaggttgttcttggagtcgaagtgttcctcgaccgcctcagaaacctcgctggtgcacttggtccacaggtcgatgagttcctgacggcgctcctcttcggtgagcataccgatttcgtagttctcgttgaccttgtcggcttcggcttcgtacttctcgatgtactcgtcgcgctcggacggctggataacgtcggagaacgcgaaggacacaccggaccacggtgcgcgggtgaagcccatatccttcagcgcgtccagcgttgccgccacctgtgcggtggagtaacgggttgcgatgtcgtcgacgatcttgctcagacgcttcttcggagcctgatcgttcacgaacgggtaatccaccggcagcgtgctgttgaacagaatacggccataggaggttgcgaaaagcacggaaccatcatggaagcgctcttccttcaccacggccgggctgcccggttccggatcgacgacttcgatttcgctcggctcccagcccttcggcagcacaaagtcttccggaaggcggataagcaccttggcctgcatgtcgatctcatgcttgtcgagggccatttcggcctcttccagcgaggagaacacgcggccctggcccttggcaccgtcgatgacggtggtcaggtagtacagaccgaggatcatatcttggctcggcatggtcacggtgtggccgtcagccggcttcagaatattgtcggaagccatcatcagggagcgtgcttcagcctgggcttcagcggacagcggcaggtggactgccatctgatcgccatcgaagtcggcgttgaatgcggcgcaggcaagcggcggcaggtggatggccttgccttccaccagaatcggctcgaatgcctgaatacccagacggtgcaacgtaggtgcacggttcaggagcaccggatgctcggcgatgacctcttcgagcacgccccacacttcggagtcgccgcggtccacgagacgcttggcgctcttcatgttctgggcatagttgagatcgacaaggcgcttgatgacgaacggcttgaacagctcgagggccatcggcttcggcagaccgcactggtgcatgcgcagggacggaccgaccacgatcacggaacggccggaataatccacacgcttaccgagcaggttctgacggaaacgaccctgcttacccttgagcatgtcgctcagggacttcagcggacggttggaggcgccggtgaccgggcggccacgacgaccgttgtcgaacagggaatcgacggcttcctgcagcatgcgcttctcgttgttgagcatgatttcaggagcgccgagctcgatcagtcgcttcagacggttgttacggttgatcacacgacggtagaggtcgttgagatcggaagtggcgaaacggccaccgtcgagctgcaccatcgggcgcagatccggcggaatgaccggaatcacgtcgagcaccatggcctccggcttgttgccggtggtcaggaaggcgttgacgaccttcagtcgcttcagggcgcgggccttgcgttggccggtaccggtgtcgatctcctcgcgcagctgcttggaagcggcttcaagatcgaagtcctgcaggcgcttcttaatggcttcggcgcccatgcagccttcgaagtaatcgccgtagcggtcttccatctcacgccacaggtcgacgtcgccttccatgtcgcccggcttcaggttcttgaagcggtcgaacacggcgctcagacgctggatctgctcgtcgaaacgaacgcggatggcggccatttcacgctcggcgctgttgcgcagcttggcgcgtgcggagcccttggcttcgccttcggcctcaagttcagccagatcggcttcgaccttcttggcacgctcttcgatttccgcgttgcggcgcttctccaggttggcgatatcgttgtcgaactcgtcctgcagacccggaagatcctcatgacgctgttcctcatcgacgctggtgaccatgtaggcggcgaagtagatgaccttttccagatccttcggagcgatgtccagcaggtagcccaaacgggacggaacacccttgaagaaccagatgtgggtcaccggagcggcaagctcgatatggcccatgcgctcacgacgaacacggctcttggtgacttccacaccgcagcgttcgcagacgatgcccttgaagcgcacgcgcttgtacttgccgcaggcgcattcccagtcgcgggtaggtccgaagatctgctcgccgaacaggccgtctttctccggtttcagggtacggtagttgatggtttcaggcttcttgacctcgccgtggctccagttacggatgtcgtcggcggtggccaggccaatcctcagtttgtcaaatgcgttgacgtccagcactctattgtcctgtctatcgattcttaatgcttaatcacgtttcatcaggctggtcgcgccgcgctgtcaggcaacgcgaccagccttgggatcactggaattcaggttcttccacaacctggtcttccttggcggccgcgtcaggacgtgcgccaatgttgaagcccaaatcgtcggaggaagtagacggatcgtcgtcctcgtccttcatgtcaatggccacgccttcggcgttgagcacttcgacgttcagcgacagggactgcatttccttaagcagcaccttgaaggattccggaatgcctgccggcggcaggttgtcgcccttcacgatggcgccgtagacacgcacgcggccgtcgacgtcatcggacttggtggtcatcatttcatgcagcgtgtaggcggcgccataggcctcgagggcccacacttccatctcgccgaaacgctggccaccgaactgagccttaccgcccaacggctgctgggtgatcatggagtacgggccagtggaacgcgcgtggatcttgtcgtcgaccaagtggtgcagcttcagcatgtacatgtagccaacggagatcggcttcggatacggttcgccggtacggccgtcgaacagcacagccttgccgtcgtcgccgaccagcttgttgccgtcgcgatccggaagggtgcaggacagcaggcccttgatggtttccggacgaacgccgtcgaacaccggagttgccaccggagtgcccggctcgcccttttcggcgccctgcggaatgtacttcttccaagcggcttcggcatccggatcaagggagatgtcccagccggcgtgcgcgatccagcccaagtgcagttccagcacctggccaaggttcattcgagaaggcacgcccagcgggttcagcatgatgtcgaccggagtaccgtcggcaaggaacggcatatcctcttccggcagaatgcgggagataacacccttgttgccgtggcggccagacagcttgtcgccctgggtgatcttacgatgctgcgcgatgtagacgcggatcatctggttcacgccgttcggcagctcgtcgccgtcttcctcggcatcctcgcgagtgatctccttgacggcgatcacagtaccggtttcgccgtgaggcacgcgcagcgaggtgtcacgcacctcgcggctcttctcgccgaagatggcgcggagcagacgctcttccggagtcagctcggtctcgcccttcggggtgaccttgcccaccagaatgtcgccggcttcgacctcggcaccgatgcgaatgatgccacgctcgtcgaggttggccaccgcgtcctcgccgacgttcggcagatcgcgggtgatctcttcggcacccagcttggtttcgcgggcgtcgatctcatattcctcgatgtggatggagctcagggtgtcgtcctgcacgagacgctgggagatgatcacagcatcctcgtagttgtagccgttccacggcatgaaggcgatgagcaggttcttgcccagtgccatttcgcccttctgggtggccggaccatcggcaagcacggtaccggcttccacacgttcgccgtcgtggatcagcggaacctggttgtagcaggtggtctggttggaacgcaggaacttggccagcttgtaggagctggtggtgccgtcgtcgttcatcacacggatgatgtcggcggaaacatacgtcaccacacccggcttctcagccagaatgacatcgccggaatcgacggccgcacgccattcggcaccggtgcccaccagcgggcgctcggattcgatcagcggcactgcctgacgctgcatgttggtacccatcagcgctcggtggccctcatcgtgctccaggaacggaatcagggaggcgccgacggaaaccatctgacgcggggaaacgtccatgtagtcaacggagctgacgggcacatcgactgcttcttcttcgccgactcgggcaagagcctgcttcttgacgaagttgccgttctcgtcgagttcctggttggcctgtgcgatcacgtgctcggcatcgcggtctgcggtcatgtattcgacctcgtcggtcacatggccgttgatgaccttacggtacggggtctcgatgaagccgaatggattgatgcggccgaaggttgccagagaaccgataagaccgatgttcggaccttcaggagattcgatcgggcacatacggccgaagtgggacgggtgcacgtctcgcacttccatggatgcgcggtcacgagacagaccgccagggcccagagcggacagacgacgcttgttggtgacgcctgccaacgggttgttctgatccatgaactgcgacagctgggaagttccgaagaactccttgatggtggcgttcaccggacgaatgttgatcagggactgcggggtgatggcctccggatcctgggtggtcatacgttcgcggaccacacgctccatacggctcagaccggtacgcagctggttctggatcagttcgccgacctggcggatacgacggttgccgaaatgatcgatatcgtcgacgtccacgcgcagatccacatcctggccgtcacgcttgcccgggaacttggtgtcgccggcatgcagggtgaccaggtacttgatggtggagatgatgtcttcgcgagacaggctgcgatcgttgacatccttttccagaccaagcttgcggttgatcttgtaacggccaacgcgggccagatcgtaacgcttggtgttgaagtagaaggaatccagcaggttgcggccagcttccggcgtcggggtgtcggccgggcggatcttgcggtacagatcggtcagagcctcgtcctgggtctgcacggtctccttggcaagcgcgtccataaccagcgggtaatccctgaacgcatcggcgatctcatccttggtcatgccgatggccatgaggaacacgatggcggactgcttgcgcttgcggtccacgcgcacgccaagcacgtcacgcttgtcgatctcgaactcaagccatgcgccacggctcgggatgatcttcgcgccgaagacttccttgtcggaagtgcgatcctggctgcggtcgaagtacacgcccggagaacgcaccagctgagacacgatcactcgctcggtaccaccgatgatgaaggtgccgtgcggggtctgcagcgggaaatcgcccatgaacacggtctgggacttgatttcgccggtgtcgccgttttcgaattcagcgttcacatacagcggcgcggagtaggtgtaatccttctccttgcactcctgcacggtgtggcgcggttcttcgaaatacggatcggagaaggtcaggctcatggtctgagcgaagttctcgatcggtgagatctcctggaagacctcatcaagaccggaggtgtggggcacggtgttggtgccgttcgccagatcctcctcgacacgcttctgccagcgctcgttgccgatgagccagtcgaagctgtcagtctgtacacccaacaggtagggtacatcaatgggctcgcggatggagccgaagttcacacggtccgacgccttgtgcagatcaatatcgtgctggtcggcgcgtgcgatgatggtggtggtgttcgtcgtagcctcagccaatggacgttccttatcgctcgctaaatcgtttcgatatgtttccccggaagcgctcccattggccaccatatgcctagtacgcgggcgcttcttccttgtcagcgtgcccgctatatgacacgcatgtacgcaaagtcatgagaataacatatcctatagatttttattcaatagtgacgccgaccggatcggacttcgctttgggatgcccttcaatcgaaagctgcgccgaatacacgccacgatccaccttcggcagggtggattgatcctccacgcattcgctgccagtacgcgttcccggccaggtgatcgtctgtttgacctcgtcgcccttcgccaacagacgatagtcggtgtcaacggggcacacattcgacttccaaaccacatcatcgcccgatttgatcgtcaacaccacgctggaagccgacacatcaaccaagcaaccaaccttgctggaaccgtcatatttgacgtccgtagtgaaatccatcgaatcgcccacaccgaaacttgacgccgcaggagtcaacgaaagcgcgacattggacgcatcgcaatccggcaccccgcttttcttctccttggtcggggacggcacttccttacgggaaatcgcatacacgtccgcatgatgaatctcacgattcaccgcgacaatccccctcgacagggagtacaggcaaaacaccagaaaagaaatcagcactatcgcagcgatgccgacgacgatgcgacggcgacgaaatatcgcctgctgttttttcgaacgtttcttgccggatttcgaggacgtcttctgtgccatgatttcacagtctagcgtgcgcacatccaaagaacgtcggcattcttcctttcataccggaagacgcacatccgcattcggcaggatttcgataagaccatcctcatccaacgatgcgatgcaccgatcaagctggatatggtcatcccacagtcgttcaagcgacttgcgattaagggcggtcgcaccttccggcagattgcgcagcgcattcagcaccagcccacgcacctgacgatccgtaccttggaaacgttgacgcggccgcgtgcgacgttcccccaatcccggacgaccattatgcaaaaacacgcaatgtcccgaaacagggcacgcctcgcacaacggagcctttgccgtgcagacggtcgcgcccaattccataacggactgattccacaccactgaaggacggtcgaaccgtctgcattttgaggcatcatcctgcggcaacatctgcttcgccaacgcacgttccgcaggtcttgcggcgccgccaagcgactcctcgccaagaaaaaccctcgaaagcaccctgcgaatattcgtatccaccaccgcgatgcgctcaccaaacgcgaaactcatcaccgcgctggccgtataatcgccgatacccggcaatgccagcaactcatcgtacgtacgcggcagcttgttatcgtaatcggaagcgaccacgcgggcgcattcctgcaatcgcaaggcgcgtctcggatagccgagcctgccccaagccgtgatcacatccgctttcgcggcatcggcaagcgcgaccgcatcaggccagcgttccatccaatcgttccaatacggtaccacacggctcatctgcgtctgctggctcatcacttcggagacaagcacgccccacgcagtagtgcggccgaaacgccatggcaggtcacgcgccgaagcatgccaccattcggcaagcgcgtccgccacagcttcggcgttttcaatttcggtattaggctcgttcgtgtcgttcatcgtacctattcttgcattcatgacgaacgaagagcataccaatgacgcgcaaggcgcaaccgcagaggaagccaaagtcgagaaaatgttcgaatacggctaccgcaagtcgaattatgggccggacgaactcgtgaccgacgcgcacggcaatccgatttccgtggtcgacgcgatgctgtcagccgaagacgcggccaaagccgaaacctccacgccccacttgtgctactactccccccgcattccgggcaataccggttcggcaatccgcctatgcgcggtgaccggcacgattctgcatttggtggagccgctcggattcaatctgcgcgatacgaaactgcgccgtgccggactggactaccacgacatggcccacgtggtattgcacccgaattttgagaatctggtggaatccatgccgaattcgcgcatcatcgcgttcaccgcgcacgccaccaaactgtataccgacatcgaatacaagccgactgacattctgctgttcggcccggagccaggcaatattcccgatccgatggatattatggccggtccgcacgtggccgaacaggtgcgtctgccgatgcgtccaagcctgcgttccctgaacctcaccaactgcgcatccatcgccatctacgaagcctggcgccaactaggcttcgccggcggccagtgatccctcccccgcctgccaactttcgtttcaattcattaccttatggatattggggacgcagtagggcgggatattccattcgtgacacactcaaggccgttcggccaagcctacggtcccgaacggaatatcccgccctactgcttgctatggcacacaaaccaacgtgttgcaaacaaaaagcaagcgtcaacctaatctgatgtgaagcgcaacataagcggggagccggcatgttctgtttcagaccgtaaagacttggcctgagcggcccggagcgtgtcgggaatagaatatgccggctccccgcgaccttccgcaaccaacgcaaccactgcgaaagatgcgtagggaagagaggggctagtttttgaagctgtggattggggcggggatgcgaccgcctcgggtcacgaaagcttcgcagctggtctggttgactggaatgatcggcgcatagcccatcaggccgccgaagttggccatctcccctacgcctttgccttcgaccggaatcacgcgcacggccgtggtcttctgattgaccatgccgatcgcagcctcgtcggcgatgatgccggaaatggtggatgcggtggtgtctcccggaatggcgatcatgtcaaggccgacggagcacacgcaggtcatggcttcgagcttttcgatcttcaggcagccgttggttgccgcgtcgatcatgttcttgtcttcggagacggggataaacgcgccggaaagtccgccgacgtaggaggacgccatgatgccgcccttcttcacctgatcgttgagcatggcgagcgctgcggtggtgcccggtgcgccaacctgttcgaggccgatcttctcaagcacttcgccgacggagtcgcctacggccggggttggcgcgagggaaaggtcgatgatgccgaatggaatgccgaggcgacgggatgcctcctgtgccaccagctggccgacacgcgtgatcttgaacgcggtgcgtttgatggtttcacataggaattcgaagttttcgcccttggcttcgtcgagcgcgcgggaaaccacgccggggccggaaacgccgacgttgatgaccgcatcgccttcggttacgccatggaagccgcctgccatgaacgggttgtcgtcgggggcattgcagaatgccacgaatttcacgcatccgtatgaatcgttatctgcggtggcgtgcgcgatgtctttgatgatgtggccgagcagttcgacggagttcatgtcgataccggttttggtggatcccacgttgacggacgagcagacgatgtcggtttcgctcagcgctttcggcagggagcggatgagcagctcttcggcgggggtcatggacttggatacgagcgcggagtaaccgccgatcaggtcgacgccgaccttcttcgccgcatggtcaagtgcatgcgcgattttcacgaaatcgtccgacgttttacacgagcttgcgccgaccagggaaatcggggtgacggtgatgcgcttattgacgatcggaatgccgtagtcgcgttcgatggctttgccggtggatacgagatccttggcgtacgtggtgattttgttgtagatgttgtcgcagacttcgtcgacgctgtcggccgcgcagtccagcaggctgatgcccatggtgatggtgcgcacgtcgagcttctcctgctcgatcatctggttggtctcgtggacctccatgatattcagcatggtttttccttacgattagtacgattcgtggcttcgattacttgcgtggctcacgtatgccgcggatcagacgcggtgcatcttggtaaagatctcctcgcgctggcagcggatgcgcacgccgatctcctcgccaagcttgtcgagatcgtccacgacctcgccgaattccttgtcggcgttggaataatccacaatcatcatcatgttgaagaaaccgtcgatgatggtctgggaaatgtcaagcacattgacctgatgttcggaaaggtatgtgcagacgcgtgcgatgatgccgacagtatcctgaccgacgacggtgatgattgccttgttcatggaactccctaaacgtgaggtgcgaatatccagttaccgtctcggcaaaatgccggacgtgccttaagtatagaaaaggcagatgtcaaaaaagtcgttttttcggcaatcgcattacattgtgagacgatttcttccgtcaaaccggtttcaaaagttgcggaaagtcgttttttggaatatctgttttcgacgtgaaatcggatttcataaaagaaaagcgcctgccgatcgtttggaaatacgatttcggcaagcgctttttacaatatgtcatgcgattcacttttcgctgatcttgtcttctttcaggaagaaggagaagaccagcacgatgacgatcagcaccaagctgaacacatagccgtagcgggatcccgcaacgaagccttccgcatcggtggcgccggagcccatcgacagcaggcaggtggcgatggacgtgccaatcgcgccgaacacctgctgcatggtgttaagaatggtggagccgcagcttcggcatctcatcaagctagccgtatctggtctacggcatcgtgcctgctggccatcgtcgtgagatagctgtgcacccatctggcccacaagtgaatcatgaaaaacgcgcgttggcgcacgtccttttcatggacgtgcgccaacgcgcgtttttgcatcagcttctgcgatcaggcctcgcggctcgcggaagccgcagcgaacgccggcaaggcgcgaggtgcgttgaaaccttccttttcgaagcggtcagcaatcttctgtgcgatctcgtgcccctggcccttatccaccagggcgatgatggagccaccaaagccgccgccggtcatacgcgcaccatacgcaccgttggcacgggccacgtccacggcaatatccaactcgggcacagtcacttcataatccgcagcgagcgaatcatgagacgcgttgaacagtcggccggcctcgtcgatcttgccgttggcgaaggcacgcacgaaggagttgacacgggcgatttcggtgatgacgtggcgcacgcgcttcttcatcgtgtcgtcttccagcttgtcgagcgtttccttgagcgcctggaacggatcgtcggacttggcgatgctgtcggcgaccacacgcaggttggccacgccgaggatttcggcggccttctcgcaagtggcgcgacgctgggcatactgtccgtcgttgagctggtgcggagcctgagtgtcaagcaccagcagttccagaccgtacttgtcgagatcgaattcctgctgggagacgttctccagcgggctcagctctggacggcaatcaagacgcaacgcatggccgaaagtgcagcgcatggatgcgttctgatcgagcccaccggtggacgcgcccgccatgtcgttttccgacttgatggcggcgttgatcagcgtcacacgaccggcatcggatgcgccataacccaaaccgtacacgtcatccaacgccaaggcggtggagcaggtcatggctgcggaggagctcagaccggatccgagcggcacgcaggaggagaatgccgcatcgaagccctgcaccgcatcgaagccggcttcgcgcaatgcccaggcaacgcctaccgggtaggcggcccagccttccacgccaccggcctgcaggccgtcgaggtcggcttcggtgacgttttcggagtcaacgtcggaaaccacgcgcaccttggtgtcttcacgcggcttgagcgcgatgaacgtgcggtgcggcagtgcgatcggcaggcacaggcccgcgttgtagtcggtgtgttcgccgatcaggttcacacggcccggtgcggcccatacgccagccggctcctcaccgtaggtggcacggaacagatcggtcgcgttcttcacaccctcgtcgtgcgagagcggctcaatgaattcaacagcagtcattggtgttttgtcctttgggttttattggctttcagccttcgatatcgattggtccgagctcgtggaagcgcttggcgatgagttccggcgtggtgtcggaaacccatgcggccatgccggattcggatccggccagatacttgatcttgttggctgcgcggcggaacgagaagaactgcaggttcaggcggtagttttcacggcgcacgtcgtggatcggagcctgatgccatgctgcgatgtacggcaggtccatacccttgccgtcacccttgtcgaagaacgcgttgccgcgcttgagcagggtggagtacatgacggccagatcccaacgttcctggtcgttgagctcgtcgagggtgagcacgtcgcgcaccggggccacatgcacctcgaggggccagcgggctgctgctggcacgtaggccacccagctgtggttgcgcatgacgatgcgctccccggcctcgatttcggagttcatgagatccttgagcaggttgcagccggtcttctcatggtaggcttcggtctgcttgagttcggcttccatcttcggcgcgatgaacgggtagcagtagacctgtccgtgagggtgtgccagggagacgccgatttcctgtccgtggttttcgaacgggaagatctgttcgatgccttccatcttggagatttcggcggtacggaacgcccatgcttccacgacggtgcgcagacgggagaccggcaggtctgccggcagaccattttcgtccgggtcgaagcagatcacttcgcagcggcctgcggcgagcttcttctcccacagcgggttgccgttgacgtattccacggcttcggaacggcccggcacgcgaaccatggacgggaagcggttttcgaacacgaccacgttgtagtcggtgtccggcacttcgccgtcttggtacgggtcgcccggcttgcgtgcggccagcgggttgcctttggcggtggcgccagggcccgcggtgatcggacggttcatgcgtgcggtcgccataggaatccagtcgccggtcagtggatcgcgacgcatttccggagcagcgtacggcacttcctcaccggccgcgttgagctggttggagaaacggtatgccagctgacgaggatcgttcagttcgcgcgtcttcgcgccggaaacgtattccggatcatcgtcgaggtagaagaaagcgcggccatcggcgagcgtggtcggcgtgatgcgaatgtgctccttcgcgtactctccgggagtgtagtttgcgaattcactcattatggttattcaccttcctgaataggctcgctctggtgtgccagcacgagctctttaaccaaatcccttgttttcccaaccgaatcggggtctagtccatcatcggtaatgaccgtgtccacctggtcgaagcgtgcgaaaagcgacaatgatgtgcagctccacttggtgtgatcggtcaaaattatggtgcgatcggcaatgtccatcattgccatatcggttgcggcctcaagcgagttcggcatgaggaagccgcgcggaatggacacggaatgcgtgcccaggaagactgtgttgacgcgcagggaggccaccactttgtctgcgatcgggcctacgagcgagttggatcgggtggtcacgccgccggtcacgatgacttccacgtctttcgattccagcgcctgcaccagttccgccaccggaatggagttggtgaggatggtgatccccgacgactgctgtgattccaacagatgttgcgcgaatacgtatgcggtggtgccgccgccgatggcgatcacgtcgccgggtgccacatatttgatggcttcctgtgcgatggcgtccttcaatccgatgtccatctgcgactttacggagaacagcggctcactcagcagcgtgctggtggtgacggcgccgccgtgcacacgcttcagcagacccttgtcggccagatcggcgatatcgcgtcggatggtcatggcggaaacgcccaattccttggacaatgcggtgatacgcaccgcaccgcgggtacgcaacctgctcaaaatcaaatgctgacgttgtgacgatatcattcgaacattatcgcacatgttcactcaaaataaaaactgagatgagcgtttcgcgcgttttcctcacgaaaaaatatacttggcactcctgtaatcgttcaaatcgaacaaaaacgaacgtcgacatcccgtcagcgaaatcaatcgacgtgttgctttcctgcgacaaacggtgcgagaatagtgaaccatgacgtatgtttctgagaatttctggcacgatgcggtgaacaaagccaccacagatctcttcaccttcggctacaagcacatcatcaagccgcatttcgtgttcaatcagacgcccgatgtggcgcacgaccagatgattcagttctgcaagatcaccaagaacattccgccgctgatgtgggcgtgccgtgaaatgctcaactattccgaccccgtgctggaaaccagcgtgatgggcgtccacttcgtcaatccgttcggcctttccgccggcctcgacaagaactgcgagatgccggtgctgctcgacaacgccggcttcggcttcgaaacggtcggatccaccacgtctcgtccgtgccccggcaatccgaagccgtggttccaccgtctgcccgaatatgattcgatgatggtgcatgtcggtcttgccaatgagggttcggaaatcgttgttccgcgcgcggaacaggcttggacgaaggcgcgcgacatgcagatttccgtgtcgatcgcgcgtacgaatgacgataagaccggcgatttggacgaaggcatcgaggattactgcatttcgatgcgccgcacggccggtcgcaccgccatggtcgaagtgaacatctcctgcccgaacacgatggccggcgaaccgttcaatcagagccctgaagcgctcgacaagctgttcaccgaactcgacaagatcgaacgtccacagcccacgctggtgaagatgccgttgaataagtcctgggaagagttcaaggatctgcttgacgtgcttgccgaacacaatgtgcagggcttgtcgattgcgaatctgcagaaggaccgcgccggcatggagattcctcgcgattgggagggcggactgtcaggttcgccatgctatgaggccagcaacgaacgcatcaagcaggtgtaccgcgagtatggcgaccgttttgcgattgccggcatcggcggcgtgttcactccgcagcaggcgtatgcgaagattcgttccggctcgtcgttggtcatgttcatcagctcgctgatgtatcgcggaccgcagcagatcaccgtgttgaagcgcggccttgccgaactgctcaagcgggacggattcgaccatgtgagccaggctgtcggcatcgacgcctgataccgattatttcaatcggcagcgagcaccaaataataatgcgccctgcgaccgccaacgcggtgcagggcgcattattgttgttcgattgttgttcgatattaccttggttattggttgcgtttagtatgcgccacgcacatactgcggctggtagggcgcatcttcggtcggaataccgagcttgtgggcggcgcgaagaggccaattcggatcacgaagcgccgcacgtccgatttcgatggcgtcggcggcaccggatttcaaaatcttcttggcctgcttcggcttggtgatcaatccgacggccgtggttggaatttcggcacgcgagcgcacctgttcggcgaatggaacctgataatcgggtttgacgggaatggtcacgcccggaatcatgcctccggtggagacgtccatcagatcgacaccgtgcttcttcaggactttggcaaggtcgacggtctgatcgagatcccagcctccggcggcccaatcggtcgcggaaacgcgcaccagcaccggcatggtgtcggggatgacggaacgcacggcgtccacgacttcgaccagtatgcggatacggttgtcgaacgatccgccgtattcatcctcgcgctcgttgatcagcggatcgaggaattgcgacagcagatagccgtgggccgcatgaatttccaccgcgtcgaagccgatatcataagcacgccaagcggcgtcgcggaactggtcgacgatggcatggatttcgtcaacggtgagttcgcgaggcttgtccaacggcccgaacgcgttggcgcttggccccacggtctgccatccgccctgctcttccggcacgctctcatgctcgtatccgatggagaagcagccggtggaagccttgcgtccggcatggttgagctgcaccgccatcgtcgcgccggcggccttcgcatcggcaacgatccaacgccatgcgtccatctgctcgtcggcccacaatcccaagtcgcacggcgaaatacgaccctccggcgtcactgcggtggcttccacgataaccatgccgaaaccgcccatggcacgtgacacataatgctggtagtggaatggcgtgggcaggccatcctgggccaacgcggaatacgtatccattggcggcagccagatgcggttgcgcacggtcatgccacgcaaagtcataggatcgaacaggccaaccgtgccattggttgtagccttcttcgaccgcttcgccttcttttcgtcttcgctcatcgtagtagctcccctccggtcgcacctactggctccatgccgatcggctgaaccttcttcttgtattccccttgagcttctctggagatttcgtgccataaaaccgacactatctgcattctacgcagaacgcccgccgagcgtggcgggcgttcattgattgttcacttccattcactgaattgcggaagcgtcactcatcttcggtctgctgctgatcctgatcatcctgctggtcgttctgctggctttgctgctgaagcgactggttctgctgctgaatgattgtgctttgctgctgggtggcattctgctttccaccgccgatcttggtgaccgtgctggatgttgcggaatacttggccgcaggctgcccataatcgttgtcaatcggcagctgtttgcgttccgcataagcattcataaagtcacgccatgccggagccgcgatggtggaaccatcccagtagctgtggtactggccgttgatagcgatattcgcaatcgggtgtccaaccgggttctgcacgtcaccgacgagcacgaacgtagcgatctggttcggaatgaaaccacctgtcgtaactagctgatcctcgtgggtaccggtcttggcgaaggtcttacgtccattggccagctgtgccacaccgcctgcgccgtcaggacggacaacgccttgattcatggcccaagcaagcgtttggatgatttccggatcgaccgcctgatggcagttcgcggaaggcaccttaatatcattgccgtccacatcagtcacctgcttcagcgcgatcggattgcattgcacgccattggacgcatatacagcgaagatgcttgccatcgtcagcggagacacgttgacgttgccgaccatcatggcaggcacgaatgatgaggtcttgtcgagcgtctcaccggtattcgcatcatgatagccaagttcagttgcggtatcggcaatcttgcacaagccgatgatggatcccatggaagcctgcgtggtgttatgagaccttgccaaagccaatgccggcgtttccgggttcaccgttccattggttattgcgttggtgacgttccacgtatcagtgccgccggtataacgatcgcatgcgaacaacgaggtcgaatacctcgtggacgtctgcaggttttcgttgacggaatgtcccgcttccatccatgccaccagattgacaggcttccacgacgagccgatggagaagcccatgccgccgccgtcttctcgatccacggcatagttcatggaatccctggtctggtcgttctgcgccgcttcggtggcatcatacgttcgattcagaccgaagcccaacacttctccggtacccggtttgacggacgccatcacgatttccatgccggaggaatcttccggtgggatggtgttgcgcgcggtttcgttcaacaaggtgttggcatcgatatccaacgtggtgacgatcttcagaccgccctctttcagcagtctttccctgtcctcgctggtcttgccgaattccttggaattcaaaatcttatgcaccacgtaatcgcagaaatagcccgcatcatagtccgcggccatgcaaccggtggaaataggctggacatcaagcgtatctgcgagcggagtattgaccgcctcttgatattccgcatccgaaatatagccctgctcgttcatcagctgcagcacgatattgcgttgcttctcggattccggctggttcgattcgacggaaggatcgtaagcgttcggattcttggtgattgccgcgatggtggcggactgcacgatgttcagctgatctgcggtggtgttgaaataccgcttcgcagccgcctgcacgccatagaggctattgccgccaaactgtgcgatattgagatatccctgcaaaatttcaggcttggaatactgcttttccatttgcacggaaatcagcatttccctcacttttcgtgcgatggtatcttccgacgcatggtattgtgcgatcggatcgtcatcctgctgcgcctgcaggatcagcacgtttttgacatactgctgggtaagggaggaaccgccctgatggtcgcccttcatgtatgtttggacgaacgcgcggaacacaccctgcacatcaacgccgccgtgagtgaagaatcgtctgtcttcacgcgctaccacggcctgctgcatgtatttggaaatcttcttcaacggcacgacttcacgattctgatcccagaattcggtgattttcgtggtgccatcggaagcgtacatggtcgacttctgcggcaggctggtcacatcaaaatcaataccttcgaccgacagcgacggaataaccgccttggcgacgctgttcgcgccgaaaaccgccggtaggaggaacaaactggcggccacgccgccacccacactcagcgtggtgtaggcaatcacgagtgcgagcacacgttgaacggtcaaagtcttcttttcgggcatggtgcccattctaaagtggtgggtctactaatcaaccggccgatcgcagccatcacgggtttctcacaaacaaccgtaaaacttgaaaaacactggaaaacagtcgaaaattatcgtctcgatcgtcgaataagcatgccaggctggtagatgatgatggaacggccctcacgcgcaatccatccacggttggcgaaatccatcagcgccttgttcaccgtctcgcgcgacgaaccgaccagctgcgccatttcctcctgcgtcagatcgtgcggcaccttcaaccccgcctcgaccggctcgccgaagcgtgacgccagattcagcagcgttttcgccaaacgtcccggcacgtccatgaacacaagctccgaaatgcgctcgttgttgtcacgcatgcgatgcgcgagcacctgaagcatgtcgacggccacgcgcggatgctcgtcaagccatgcgaacagggcgtcatgctcaagccatacgactttcgtgtcactggtcatggccacggcggacgcggtgcgcggtccaccatgcggatcgaacaccggaatctcacccagcacttcgccgtacgcatgaatgctcaacaactgcacacgtctgtcggacgattgccggatcagtttgacgcgcccgcgttccagcagatacatgcggtgatcggtgtcgccttcgcggaaaatatagtcgcccttgctgtattcggcatgctgcagatgcggcagcagttcctccgcctcttcggaagaaacctgcttgaacaacgcggtgtgcagcaacgtcgcgctttcgccactgggtccactattggtctcgtttggcgtagccatttgtcacacctccgttcataggcacatcctctgggcacgccgccaggcgtattgccgggcgcgctgccgcggcttcgaaagcttgttgcgattccacatgccctcacggaacaccaagctttcgtaacgttctcattgcccttgatatcaggggcggcttcgaccatcgggctacattgtaactcgcctggcggcgtcgagcagccgttcaaccacgtcttcacgactcatgcccgtctgcgagcgcattggatcgactcgttttaccgctgatttcaccgctttgtccgacattttctcacgtgaggtgttcaatacccgccccattttttccgcgtcgatatcgtaggcgagggtcacgtggtgcagtatggcgccaggccctccctctactggtgtgaatcggcgttgtgcggctccgccgagtttgccgtattgcgtggcgatgtcgttgagtccggagaatcgtacgtcgagcccgagttccttaagcgcgcgcaccagccagaaatcgcagagccggtatgattcctcgatgcttatgccttgggtgaaatcgaacggcgcgtacaacgagtaggtgatggtattgcccggttcgatgaacatcgccccgccgccggtgcaacgtcggaccacggtgaatccttccttctgcgcgaccgccgtattgacttcgtcttcgagcgactggaatttgccgatgaccacggccggagcggcccattcccagatacgcagcgtgggttcgcgtttgcctgccgccacttcgcgcgcccatgcgatgtcggtttccatttgttcgttcgggtcgcgcggcttgtcgtggatgacggtcggtttcaggtcccgccagcgttccagatattcctcttgtgtcagcgcattatgcattcccggttgttccccggaatattgtttcgtggaccgcgcgatatttccgttgcccgttgcatcttccgcattacgcgattcactgcctgtgattgcgcggagaaaagcgatggcaatgccttctgccgtcatacccaccaatcgcacgttcggatagttcgcggtaatcgcttgcaatcgtcgcgtaatgtcgcgtgtgggcgcgcctcgctggctttgcagcaagttttcccaatcctgcaatagtcggcgggaatccttgtcatcgccgtcaagaaagaaatcgccgtcgatccgacattgttccacggattggatggaacttgcacattcgcggaaatatgctggaatgtcatcagaaagccggacggaaacccctacgagtttgccgcccggctgcttgtacagccctctgcccatcaatcttggagttcttggccgtgcccatcgcggtgccagttggacccgtagctggagcacaggatgaggactgcttcgatcagagcccagattccggaaatgatcggtccgatgaggatgatccatccgatcagggtcagcaacagctgggccacggccttgccggtatatcccagatagaagttgtgcacgccgagggtgccgaggaacaggccgagcaggccggcgacgatcttcgacttctgcgcgtagccatagccggactgctgttgggtcgcctgatagtaggtctgctgcgcgtaggttggtggctgattgcatgcggactgcgtgtattggggctgagtcggctcctgataatagggggtctgcgccgattgtgcgtaatccgtaggtccgtacgtcggctggccgtagatgggctgtgcaggttgcgcaggctgagtcggctgcccgtaagcgggagcggccgagccatatgcggggacggacgaaccgtaggcagccgactgaccatatggctgaccattgccgtacgtaccgccagggatgttgttgccctgcgtacccggggcatatccctgcacgggctgctgcgatgcgtacgggttgagattgtgcggctgtgatgcaggctgattgtagccatcctgcgactgcctgtaatcggcttgagttgaatcgttcgtcgcgaaatactcgtcttggccggaaccgttgtaatcggcattgttgtcactcatggtttcaacaatatcccataatttgccttgttgctttcatccaccctgaaagcaatccctgaaatccccctgaatatgcgaaacgcctgtcgaattcaagcatgaactcgatttcgacagacgtctcaacaggcgaacatatccggcgcaatcatgcgttccggatcatatgtcacatgcgtgccagaatgtcgcgtccgacctcgtcggtggagcgggtagcggatcccagctcttcgatgtccgcttcgacggccgcatcgatcttggccgcggcgtcgtcgaaaccgaggtggcgcagcagcatggccgcagaaaggatcgcggcggtcggattggccttgttctggcctgcgatatccggtgcggaaccgtgaatcggctcgaacatggacgggtattcgttggaagcgttgatgcatccggaagcggagtatccgacaccgccgaccacggcacctgcctcgtcggtgatgatgtcgccgaacaggttgtcagtgagaatcacgtcgaagcgggacggattcgacaccatgaaaatggtggtcgcgtcgatatgcagatagtcgtgggaaacttccggatattcctcggcgaccttatcgacgatgcgctgccacatgtctccggcgttgacgagcacgttcttcttgtgcacgagggtcacatgcttcctgcgcttcatggccagatggaaggcgtaacgcaccacacgttccacgccgtaggcggtgttgatggaaacttcggtggccacctcgttcggggtgccgcggcgaaccgctccgccggcgccgcagtacaggccttcggtgccttcacgcaccacgacgaagtcgatatcacccgggttggcgagcggggaggtcacgcccttgtacagcttggacggacgcaggttgacgtactggtcgagatcgaaacggagcttgagcagcaggccacgttcgagaatgccggccttgatacgcggatcgccgactgcgcccaacaggatcgcgtcggtcttcttgatgcgttcctcttcctcttccggaagaatcgcaccgtcacgcaggtaacgttcggcgccaagatcgaaattctcgtaatcgaattcggcaacgccctcagccgccttctccagagccttctgagcccacggagtcacttccttgccaatgccatcgcccggaatgacggcgatggtgtacttctttgcagaatcactcatagcacgcgactctagtcaacgaatcagcacgtggacttaaaacgctcaactaatggacactccatgccgctttcctgtacgaaacacacgaaaagcatgaatcatacgaatctcacaaatcgcacagcctaatcagctggtaatacccatcacgccaagacaccaagcattctcataggagatctcctcccactgcttgtaccttccagacgtacccccatgaccagcctcaacctcaatcttcgccacggcatccacgcccgcacgctgcagtcgggccaaccatttcatcggctccacatacagcacacgagtgtcattcatcgacgtggtaatgaaaatcttgggaaaaaccgcaacccgcgcatcatttgcatcagacggcgcattctcatacggcgtatattccttcatataccgatacacgtccgcattatgcagcggatcgccccactcatcccactccgtaaccgtcaacggcaacgacggatcaagaatcgacgtcaacgcatccacaaaaggcacatccgcctcaacgcccgcgaaacattcgggagccatattcgccacggcacccatcaacaggccaccggcggaaccgccatcggccaccgtgcgagcaggcgacgccaaaccggcacgctgcaacgcacgcacggcatcaacgaaatcctcaaacgaatgcttcttattgagcaaatgcccctgctcataccaagcacgacccatctcaccgccgccgcgaatgtgcggcaccgcataaagcacaccacgatcaagcatgctgatgcgagacaccgagaatcccggatccgaactgatctcatacgcgccatacccggtaacgaacatcgccgaatcacacgcgggcacatccctgcgccacaccaaggaaacaggaatgcgctcgccatcgcgggcggtaacccacaccctgcgctccatgtattcgcgcggttcaaatccaccaagcaccgtggcacgcctcaacaggcgatcctcgccggtcgccggatcgatatcatgcagttcgccgggacgcgtgtaactggagaacgagtagcgcatgcggggcgcatcatacgaaggattgcctcccacaccaatcgaatacaagcgccgggtctcccccggcatcgcatcggcggtcgcaccatccgatgaggtcatcgccttgcgggaaaccccatgcacggccgacccctcgccttgcgcggcggccaattggtcgagcgcgccccacacttcggcacgttcctcgttgatctcgtccaccgactcgtcgacatcccaatcgtcttccaacgcgtggggaaccagctcggtgaacttccatggacgccccgcaagaaaatcctccgcagcggcatccttcgtcatcaccgcaatatgcgtcaggctttccgcccggtactgcagcgccacataatgccggtgaatcgagatcccctcaatgccaagaccatgcgcaccctgcaaaatggctggattgcagggattggaatacggtgtgccgatcggcatctcagaagcgcccggttcgacttcgtcgccgtgctcgcatccgtacggcgaaccgacggccacacgcacgccctcacccaaacggtacgggggctcatgggagcgcatgtcgatcacatcgatttcgaaattcgggttcaacgcattgtgatagaccacggcgagcggaatatcctcaccgcattcgccggcaccttcgaaacggctgaaactcacgtcgtattccacgtcctgctcgcgcggaatgaacgcgcggaattcaccttccggatcgtcggtggaaagcagcaatacctcggtggtagtcttcgacccggtgccgatcaccagattgcgttcgtcgaacgacaggccgatgccaacccagaatcgttcgtcctgttcgcggtacacctccacatcgtcggtgatgggagtgccgacgcggtgcctcatcaccgcatatggacgccatgcgtcgtcgagcagcacatagaacacccattgcgcgtccggcgtgaagcaggtgccgccgatgccttcgaacacttccggcagctcatcgccggtttcgatgttgcgaatacggaaatcgtaacgttcgtcgccgctggtatcagtgccgtacagcatccaacgtccatctttggaaatatccatgccgccgacgcggaagaaatcgtggccttgcgcttcggcattcgtgtcgaacaccacttgctcaccatccatgggcacgccgatctcaatggtcggcggatcccaatcgtctgcgcctcggatcggcacacggcattgcaccgcatactgctggccttccttggtgcgtgtgaaataccagtagccgtccatgcgcgtcggcacggacatgtcagtttcctgtacgtgcgatttgaactcgtcgaacaatgtggtacgtaggtttttcaacgcttccatgcgctgttcgcaataccggttctgtgcggcgacgtaatcctgcacgtcctgcgattccttgtcgcgcagccattcgtactcgtcaatgaaggtgtcgccgtggaacacgcgctccgttggtacgcgtttcgcgatcggcatcccgcattcgtccagacggccctgacggctcttgccactttcctgctcgcccgttgcgccctgttcaccccgaaaatcagtcatgcacgcgattataccggcattgcatttccaatcccacgcggcacgcacccctgctccgggcgtacgaaaaagtcagacgcccagctgttgtttcaggaacggcagcatggttctcatcaaattcgatccggtcgttcccgtgaatacaggaacgtcggtgactggaatcggctgcgtggacgcacgccccgcaacggtgccgagattaccggcggcctcgcgtggggacaactgccgaatgccgatcgcaagcacacgacccggatatcgacgcgcgatcgtggcgtacgtggtcggatccttctgcccatcatcgccgatcagaatgaacttcatatcaggaaaatcagccatcaattgttcggcatactcgagtttgtgctgcactccggtaggaatgaacgttttcgggcggggatcgaggtcacgcagcagcagcggtccttccgggaacccatggtcggcgatgaaatgcctaatcgagctttccacattccacggcgacgtcgacaggtaaaagaacggggcgtccggaaacatgtccgcaatgcggttgaacagcaggttcatgcccgcaaccggcattttcttcttcggatcgagcagcagcagattgtaggccgctttcatcaggcttggcgcctgcgtgaccatgacggtgtcgtccacgtcggagatcacaccgactttcgtgccgctgggaatggtgaacaggttggctttgaccggcttgcggctgcgcaccttgtatgacacgtcgtgcacgcccggttcgagcgaatgttcggccacgagatcgagatagcctgcggaatcggatgcgacgaattcgctggaaacattgcgctgcgcatccacttcgtcatacacttccgacatccccacctgcacggtttccaggggcatgccgtcgatggcaatgcgcaccttcgtatacggcgagggaatggtgagcatggcacgtatgcctcgggtcaggcgtcccgcctggcgtttaaagggcccgtacacggttcggcagattaggcgcgagtaatgttcggtgccatagccgacatacggttccacgcgcggataccagttgagattgcgtaccatgtttgtcgagaccgtcacccatccgttgaacgctctggtgatggcacggcgaaacagctgtgtcagcggaggcttgacttcgatgcgctcatgtttcgaagcggcgtcgaaggtggtgaccaccttgcgtgcgggaatgggcacggtcggcatgtcatcttcggatatggcgtccggttcacgctggggcagcggctgtggttcggtcatatccccactataaaggcgattgccgaactccttggtgccccagcgtgaaaatcagggatttttcagggaataccgatgatttcccatccaatttcccgaatcgtgccgttcactgagccacgatgttggcatattcttcggaggaaagcagtcccggttcgtcatcctcaagttcgattttgaaaatccagccttcgccatacgggtcacccgttacgatgcttggatcgtcggcggcctcgttgttcacatagcgaatcacgccggccaccggagcgaccagcggcgtgaccgccttggaggattccagttccgccacctcgtcgcccgcctgcacttcggtgccgacttccggcagatcgatgtacacgagttcgccaagctggtcggccgcatattcggtgatacccaccatggccggctcggtggaagcatccacccacacatgctcgtcggaatattcaagatgctcgggaacatccagattcggcttgttatcgttttcttcgctcatgaaagctcattctacgtcaatcgtatgtatttccctagagcagtgccgaaacttgctacgggaggtcgtggccgagccattcttcgatcatgtagcgggcgatggtggcctttccgggagcttccatacgccctgccaccaactcgttcatgtattcgtcgcgggtcacccaacgcgcctgcagggtctcgtcgccgtccacgcgcacgtcggtggtgttggccacgcctttgaacgccatcatgagcgatgcggggaacggccatggctgcgatcccaagtatttgagttcgccgatgtctatgccgacttcctctttggcttcgcgccggcaggcatgctccaggttttctccggcttccacgaagccggccgatacggagtacagtccggtgttgcgccatgcgctgttgtgttgcagcagcagacggtcctcatggtccacgatcgccgtgatgacggccggttccactctggggaacagcagtcgcttgccgtccgcttcgctggcgcagcgttgcgcccatcctcccaacgccggttcggtcggagcgccgcatgtggggcaatgacgttggcgcgcatgccatacgcccagcgagatcgccgtcgtggcctggcctgcttcgcgcgcgctggcatgcggtgcgaatccgcgcagatcgacccagtcgaatcgttccgcagcgctttccagcaacgatttcgacgttttcgcttccggttcgtgctgttcgccgaacgcatcgtccgcgcccatatgctcgctgcttgcggccaccgtctccgcggctttcacgcgagacacgtcaacggcgaccacgtgttcgtcgcgtttgccgccatacgatccaaggaatatggcgagcgccgtcggatgcgtgtgcagttccgccgccacgtaggcgccgggcaattgcgcgagacgcatatgcacgttggcgtagtccgcgatggctccctgtccgcgcggcaccgccaccatgccgtctttgacgagaatgaccttcgtgtccggctccagcagcgccgtgtcgaacaggtcgggttcgccgcgtctcgaaacctcatagtcgatgtcgccttgcgcaagtggcaggaacggcagtgcctgggtcagcgccaatggtgagaacacgctcatcgattgcttctttccttgaatacgattgatagagcggatattttttctctattccgtattttcttttctatttttttatatcttttttgtatttctgattgcgatattgacggcagcggcggaaaataccggctactgcaccctgcgcaccagcgcgagcagcgcgtcggcaaccgcctgcggatgctcgtatgcgctgaaatgcccgcaatcgaataccaccgtcatatccgcgctcgtgcctgtcatcgcatcggcgatcggcgtcatcacgctcggcgggctcgacggatccttgtcgccgcagatcaccgcaaccggtgctgtaatcgcaggcaacacatcgttcagatccgggcgcccagccgccatgcgctcacgccatgcgataccttcggcaggctgctcgttgatccacgtcgtgaactgttcacggtaggcggccgactgtttgatggtggaatcctcaggcgtggcggcggcgaatcccataaccggctcgtgtgtgcccgttgattcgcattcctctgcgatcgcgatgcgtttcgcacgcatctgctcggaatcagcgtcggtcttcgtgtcgcataatgccagtgcggctacggcttcggggtgcaaacgctgaatgtcgagaatcaggtagccgcccattgaaagacccacccaaattgccttgtcgtatccggcagcgtgcaacaggtcgacgtaagcgtcggccatacggtccaaaccgttggggaaagcgccgtccgtgtctttgcctccactgttctcgtcggaaggaatcggcccttctcccgcaccgggcatgtcgggaccccagatcgggaaccgtttcacaccatgttccacagcgcccgcctccaacgcctccgcacattcgtcccacatgcggtggtccacggggaacccgtgcaccagcaccacgggaagcccctcgccctcgcaatacacgttattatgtaattcgatcgtcatcgtctcactccgttcctctcccctatattgcctatgtatctatcgcttgcgctgcctgcattcgcaagctgccacgcgctttcctggcgcccacggccgaccggtttcgacgtcaaccataagcctgtcggctacctgccggcccaagcgatcgcctgacgcacaatcgtgccatatccgttgctcatctggttgacgaaagtgtcgaggatctcgctgttcggattgacccattccacgtcaagcgtctcgtcctgcggcttgcaatcgcctgcaatcggcaccacataacacaatgcgatcgcatgctgacgggaatcgaaatagtcggatagtccgggcgttgggaaaaattcagccacggtgaacggctgtaggctcactggcaactgcggcagcgcgatatctcccaaatccttggcgatattgcgcgccacggcttcacgcaacgattcgtggtagagcacgcggccggcaatcagcgttcgttcgatgctgccatcgttagacacacgcagcagcgatccgacctgtgagacacgtccaggtcgtcggtgcgcaccggcaccacgagcacgtatggtatcggcatttcaccacgcatacggttgatttcgtcggaagcaagccatcctggagggtttcctattccgcggatgaaatcctccggcgtgatgtcgtcgaattctccgcgacggcggcctgcatcgaaatcgccctcgtcgagcacttcatcattcatcactggcatagtcccattatcacgcatcttgtgtgaattggctggaaaagcatgcgctggaagacgattcctctgatagcggatcttgcgcatgccgggaatacgtagggttggggcacggttatatactccaaagcaatcgcatacgaaaggcgtagcccgtcacgcgcgtcgatggcacgaacagcaaggagcaatcatggcaacgcatgcagtcacttccaaggatttcaatcagattgtggaatccaacgatctggtattcgtggatttttgggcgacctggtgcggtccgtgccgcgcattcggtccgacattcgaaaaagcgagtgaagcgaattctgacatttatttcgccaaggtcgatatcgaccagaatccggatctcgcttccgcggccaaggtacaggctgtgccgacgttgatggtgatcaagaaccagcagatcgtgttccagcaagccggtgcgttgcgtgcgtcggatttggacgatctgatcgcgcaggccaaggcgttggacgtcaatgcggccgctgccgaagaggctacggaacaggcgcaataaggcgaatatcaaaggattgcaaaggtgccgttcgatggcgaaacatcaacggcaccttttgctttgcacgcttgctttgcatgcccgctttgcccgcctgttacatatgcgctcgcccggattccatggcatggagtagaatgtcgcgttggatatgcgctttccggcgaagcctgaagtggcggcgcaccgcatgccgtgcatgtgtgaattcgtcgaggatctgaacgcgcgtttaggagcagaatggctaaccacagcaagcacgcccgatcgtctaccttcgccatgccgagcaagtcctcgctggtgaagatcgccgcaacggtcgcggcggtgggcctgttggctaccggcggcattgtgtcgcgcaatctttacacctccgcggagcagaacacggccaatcaggtcacggccttctccgtcaccgattccgccgaagcatcccgtggcaacgcccgtgagctgctcaatggagacacctcgtatgtcaccgtgaagatcaacggcaagtcgcgcgtggtgcccggtaccaatttcaccgacgtgaagtccgtgctcgacgcgggagacatcacgctcgaaccggaagacacggtctccccctcgctcaccaccaaggtggatgagaagaccgtaatcaccgttcagcgtgccggcgcaagcgttgaggtttccgacaccgccatcggtttcaatgtcgtcaagaaggaaacctcaagcctgccggaaggccaggagaaggttgagagggaaggcgaagagggcgtgatggaaaccacgaacctcgtaaccaagtccggcgacaccgtggtctcctccaatatgatcagctcgtatgtgaagaaggctccggtcgacaaggtcattctcgtcggcaccgactccacttcgtcgtcgtcctccagcgcttccgcgtcgatcggcaccactgtgccggcgggcgaaatgcagcagtgggctcacgattatctgctgtcgaacggctacaccgaagccgatttcaccgccaccgtatacatcatcacccacgagtccggctggagcgtcaccgcaacgaatccgagttcgggcgcctatggtctgccccaggcgttgcctggcagcaagatggtgagcgcgggcgccgattgggccaccaattatcagactcagctcaagtggttctggggttattgcgcgcagcgttatggttccattcagggagcctacacgtactggctggccaatcactgctattaaatcgcgattgatcatcattgattgattcgatgatgatatagtttgagctccgtaatattcgaagatattacggagctcaaactatattacgatcttaaatatcactgggatatcgccgatttcacagggcattgttggaaccgatcaccgtggcttccttgacgtcatcgatcttcctgcgcctgcggccgccgtgaccggccttcggaccacgcttgccgacggtgccgctgcggaccccgttcttggcatcgaagatgatcacgcgctcatcgctgtgatattcgccgtccagagcgaagaaggcgatcttgtctgcaggcacttccgggaaggtgaagaacttctgcgtcgcaacgagcaggtcaaggttgcgggtggtgacggaagacggcgtatcggcgttcggagcattgaactgaagagcgaaatcgtcattctcatcgcatacctggattgcgaacttgccgcgctcgtaattcaccagcagcttgacgtattcaggacgtccgagaacttcggaaacacccttggaaaaacgaacggattcaagcatgaccgtcatggtcaacttgccaccagttctttcgccaacttctttgaaaccatcaagaacggacatgtaaatccttcctttattgtaaataactacgtgaaatactgtacctcattgttaagaataaaacgaatcgaatttcggggaatatattcatattttcaagaacacaacgtaatacgaaaaaacataccgcagaccatgcttgtctcaatgagaaattcgatacggttcagccagcgcgcttcctaagccaactcgatgggcacaccaccccttgtcaccccgacggttttccgctaaaaacagatgtggcaacccctacctcacccccgcactacgggttgcgcaaattgcaaatactttgcagcacagttttccaatttcatataggaagcgctgaaatatcgtgctttatgcacgcatatcatttgcaaaacggttcatataggggctatcttgcgcaactatcttttgcaatcattttcatttttacaatgattttctcagtaacgattttcattgaaaatccgccatttttcagcatcttttacactccaatcgggatagaatatacactacacggttgcagtactgcaaacgctatcaaagaagatgggacccccgtcgcaaagcagcggccacgataacggagccacaagccccgataccggcccaaacacaagaaaaagaaggatcaggaaggtcaatgaaacatcggaaaccaactcccgcctggcagaagctgggtctgcgcgtcagcaagaagctggcggtgggcgccacagcccttgccacagttttcggcggactggcagtcgccagcgtctccgcacaggcgagcaccgaccgtaacagttatgcggacaccgtaggcaacccgactttcgaagcagcacgcaaaaagtacggtctgaccaaggagatgaagaacggcgccattctgcacgcgtggatgtggtcgttcaacaccatcaccgaacatatggatgagatcgccgaagccggttacacctccattcagaccgagccgatgagcaaaatcaaggtgaacgacgccaacggcaagaaattcaccgaaaattggtattacgtgtatcagccgacgaacacctccatcggcaacttcgtggtcggcagcgaagacgacctgaaagccatgaccgtggcagcccacgcgcatggcatccgcatcatcgtcgacgttgtggccaaccacttcaccgccgactggaacgccatcgactccgactggcagaagagcgaatatttccatgcgcgcaactcctgcagcggctccggcggcgacaacatcgattattccaaccgttggcaggtgacgcactgccacctgctgggcctatgggatctgaacaccgccaatccggaagtcgccaatcgtatgcacgacttcctgaaaaccgcggtgaacgacggtgttgacggcttccgtttcgacgccggcaagcacgtcgaactgccgaacgaattcgacggttcgcagtattggaccaccattctgcagaacggctcgcaataccagtacggcgaagtgctgcagggcgattccggactggattacaaggcgtacgccaacctgtatgccaagtatggcgaaggcggcggcggagccacggcctccgactatggcaagaccatccgttctgcactgtggagcaagaatctcaatgcgggcaatcttatgagcttgcgcaacgggggcgtcaacgacgatcagctggtcacctgggtggagtcccacgacaactatgccaatagcgacaaggaatccacgtatctgaccaacgatcagatacgcttcggctgggccgtggtcggcgcacgcgcaggcggagcgccactgttcttcaaccgtccgaaggcctccggcggcaatcagccccagttcgcagaagcctctcagctgggcgacgccggcgatgacatgtggaaagacacggctgttgcggccgtcaaccatttccgcaatgccatggacggcgaggccgaatacctgcgcaactgcggttccgaacagaacaacaactcctgcctcatggtggaacgttacaagaccgacaacaatgccggcaatgacggcgtgagcatcgccaacatgggcggcgaccagaatctggccggcactccgaccaagcttgacgacggcacgtacaccgatcaggtgaacggcggcaccatcaccgtttccaacggcaagatcacttccggcaccgccaagggcgatgcggtgagcgtgtacttcaacacgagcgtgaaggaatccgtttccgcgaccgtcagcaagaagttctcctccaacaccatcaaggtgacgctgaacgccagcaatgccaccaatctcacttactcactgagcaatggcaagaacggctccttcgttgacggcgactcgctcaccatcggcggcgatatggagatcggcgattccgtcaccctgaccgtcaagggcaccggcgccgaaagcggcgaagcgctcgagttcaccgcaacctacaccaaggttgaggttcaggcgaacacgatttatgcgacgaagccttccggctggagcaagatgtacgcgtacgtgtacacgggcgacggagcgaccgcgaagaacaacgcggcctggccgggcgtggagatgaccgcgatggcggccgccgattcgtgcgccaaggccggcacatacaagtatgaggttccggatttgggcgagggcacctatcgcgtgatcttctccaacggcaacggctcgcagatgccgggggccagccagcctggttttgaattctcgggcaaggtgagctgggatggttcgtccgcctcgctgacagccatcacctgcacggcaacgcctccggttatcaagaccgcggacatcaccttcagcgccacggccgacctcaagaccggcgagaccctgtacgcggtcggcgactggagccagggcaagggcaagacctggacccgcgccggcggcgtcaagctcgccaagaacggcaacgcgtacaccggcaccaccaccatgaccaagggccaggccatcaccgcccgactgatcaaggtcgacgcgaacggcaagaccacatgggacgagatcggcgacgtcaaggccaccgccgacaagaccaagaccgtggacctcaagtggaccaacgcggtcgagaacaccgtggacatcaccatcaacgcggccgccgacctcaagaccggcgagaccctgtacgcggtcggcgactggggccagggcaagggcaagacctggacccgcgccggcggcgtcaagctcgccaggtacggcaacgcgtacaccggcaccacgaaggtcggcaagggcaacgccatcacattccgtctgatcaaggtcgacgccaacggcaagaccacgtgggactcggccaaggaccgcaagtccaaggccgacaagaccaaggcgctcggcgtctcctggacctccggcaaggtgaacgaggacggcacgatcccggacgactccgccatcagcatctccggcaagggcgtcgcggacggcaaactgtccatccagaaaggcaacctcgccgagctctacgtgatcggcacccaggacgccaccccgtccgacgctgtctggtggagtgacggggccgccgtggcggtctccggcaccggcaccgtctacggcgtccagaccggcaccgccaaggtgaacgtgaaggtcggcaaccaaaccgccaccatcaccatcaccatcaagtaaacggcaaccgccgatatccataaaacatttgagccttggaattcaatatcactccaaggctcaaatcatattcaaacgcttctatacgcatgaaaatacacacatcaaaatcagcggatttagcataatcagctcaaagcgtcgtgcagatatcgctttgagcggctgcgcatgatatccagtgcaatatcggcattgcagaaatcgatggtttgtgaggtatcagtacaatcaacttcggaaaaatcagtgatgattctgtcggcgaattgcacttcctgcaggatttgaccgcgtctggtgccgagttcatgctctttggtaccttccgtatacacccagaacggtttatggaagttgatggagaacagcgtgccatgataggagtccgtaactacaccctccgcatatttcaccagcgagaggaattcttccggccctgcctcgagcacattgacaagctcatcgcatttcggcacattgcccgcctgcggcgtcagcactgcgacaggcaggccgactcgacgagacagttcacgcagttgcctgaatacgccgacagcacgcttgggacgcagcagcgaataaaacagcagatactgttcgggcacgtgttgcgacttacgcaacggtatgcgttcctcccattcgcccgcgttgagcaacagcgtcggatcgcatacgtgttccacatatttgccgcttacctgccgcagtttgccgcatgcggaacgttccctcgccgaaagcgcgctgaattccaccaacgccggtccgatgcgccgcagctcatcgtcggtcatggtggccggcgacgaagcatacgagattttcctgcagttcgcccatttcagcaggtacgggtccatgtacttccagtcgacgcgttccagctcgttggaatgcttgttgatgatctggtcgctgccgctcacggccacgtcgaatgcgtcagccagcgaattcagctcttccggctcctgatagcgtcgttggcccacatgtatgttcgtgctgatgaaccgctcgaaattgcgcatgcgcttcttgcgcagtcccgcaaccggcagcatggttaaatccgcgagggacgatttgaggcccagcccacgccaatataagcgttcatagtagcgttcgccctcaagcggccggtagtcgatgacagtaacgtcatgccccatgtccgtgatggttgattgcgtggcatacgcctgcaataccgaaccataattataggcagcatgatacgtgattagaccgataatattatgcttctcgtccatatttcctcgtcgttcaagtagttatttctttgttttctcgctattgcagaagcactccgctttctcattgttttccactgaattgcttatgacgcacccatgcgatcgcagcgctcacgtaataccatcgatatttcatcgaaagcaacgcgatttgtcgggtcacaggaaaacgacctccccgatatcgatcaagcggctgccgaaaaaccggcatgttcactacttttccatagtgattctttcgttcatgacggttccatggcgcttcgggattgaacagatcattgatcataatgatcgtcagatgaaataatgtgtaatcatcgagcgttccatcagatatttcccgaaattgacgaatggtatcgcgcattgtttcgatcgcagatattgttcgccgcacataatcgttggagaacgaccgcaccgccgaatccgcattgcggcggtattcgtacaccatttcatccacatagccgattcgattcgccgccgcgaccgcacggaacgcatattcggcgtcctctcccaaactcaaggtttcgttgaatccgtcgatccttttgatcagcggcatgctgtacagcttgccccaaacaagcgcgatacctcgctgcggtcggagcatatcctcgcataggtcaagacgcctgcgtccctcgaacaccatgtcagtttcagcataatggtgttcttccacacttggagatccctcgcctttgccgcccataatgacggcaccagcggcgtcgggaacaccgttcgcatcggcatcggcacctgcaagcacgttgcggtacgcccccatcaccacatcgcagcggtatcgcaccgcaaacgcaagcatgccgtcgacggcatgcttggcgagcacatcatccgcatcgaggaacatcgcccactgccccgtggccgcgcgcaatcccgcgttgcgagccgcggagactccggcatgggcgatcgtttccgtacgaatgctgaccaatggcgaattccaattcgagatcggtgccgtttcgaatgccggcttaccatcgaatacaatcaccgcttcgatacggaagccactgccctgctgccgttgcagactgttcacgcaatcatgcaacgtttgcaacgtggcacggtagacgggaatgatcacactgatggtatggctcatcgtcagttcagctcccgtgtgatcaccgaagcatcataccggaacgataccggcgattcgatgctttccgggaagttgccgatcgccacgaacgcaatcagcgtttcgtagtcgggcacgcccaacagcttgcggatctcatgctcctgcttctcacgcatcatggtgttgagagggcaggcggccagcgactcgcattccaatgcggtcaggaacgccatggcgaacaggcctccgtcgatatacggctcgttgcgttcctcaacgcttacgaaactgcgcacgtccacgctgatcaacgccagcaccggaggcgcatcgtacccacgccacccgccctgcaacgccaatgcctgttcgatgaatttcggattgctgatcagcagcacgcgatatgcctgcctattgcataccgatggcgttttcatcgacatgcttacggccttacgcaccgttcccatatcaacaggggtttcggcatactcgcgtacgctggaacgccctgcgaacaatgctgcatagtcgagcgatgcgttgtcgcgtttgtctgcggcacgcacggttttcacgcccgcattgcccgcaacgtcggcgttttcggcttgttcgacgctttcgatatccaccgaggccacttcgtcggcaaaccatacgcccacaaactcaggaatcggcttctccaacgcccgatgcttgcgcacgtatgcacgaaccacctgccgtgccgcgatatacgtcacatcgtcaaccggatagtcgcgttcccgccattcatccatcacggaacgcaactccccgaacgcggatctgccgaatcccgcacggaaccgtctatgcgacaatcctttttcaatacgatgaatgtaatacaccatagtgccgcgcaattgctcggattgccccacattccattgccccgcgcagaatctcaggaaccgtttgcgctgccccgcatagtacgaagccaatgtcatgttcgctttgcatccttgcaatacgcgccagacgcgatgcggaacgatggttttgattcgctgcttcacgcccatgatctcacctttccttgttttctcgacgcaacgacggcaataccgcctgcaccttggccatgacttcccttgtaaaccagccttcacgcagcttctgccccaattgcgaagcccgtcgtaccattcgcgcatactcgctttgcgtcatgccgtattccacggccatggcctcttgcaacgattcgacggcaacgcccactccctgttcgactacgaatggtgcgagcgccgccttgttccatatgatcaccggcttgtcggctgcaagatacagcgacagcttatgcggattgttgacggtcagatatttgccgtaatagccgccgcaggtgtcgagactgtcgccgtcccagatcagaccgaatcgtccttccagtttgtctggcagttcatcgggtgcaacgattccgcggtaccacgccgttttgccgttccgccggtcatatttcggcccgtacagattgatgtcggctttggggaatcgctcggccagccgatacacgtattcggctttgccatggctgagatttcccgcgatatcgatgccgtgacgctgttccacgggcacaggattcgcttgcggcagcaggtaatcaaaaatgccgatctccacgatcggcacggtcgcgccgtacttgcgcaacacttcgctcatgcgtggattgtggctgatgagcagatccgcttcggtcacccattgtttgtcgaaatcggtgtaggagtagccgcgtagcgtttccaaatcatgaatcaggaaaacaaataacgctccgcgcgctttcatcctacgcacggaaggcaaggcgtacagcgacaccttattgtacatgatgagcggaaattgcgccaacaccacgtccccgcagcgaacggttcgttccagccgatgccaatcggcaagcgtacgtccaacgcacaccagcttgtcgaaataccctttgttctcgccgggacgcacttcgaacggctgccaggattggctttcgagcacctgccgaatgtcatcgcgcgctttggatccagcgtgcgcatgatgcagcgaacgttcgcagatcacgtagttcgtcattgccaacctccattgtttgcatatcgtccgtcactcgcattgcttgcgccatgcgcgttattctcatcattcgttttccgtacatgcagtcggttgaataccggctgaagcatggccataacgaatcgttcgcggcacagcagcaacgcgatgccatatatcagcgcgaacaggaatccgccgaacatcagccacaggaaggcgttccatgtctcggcaccgcatatcgcgatcgcgccccgcgtaaggcagcctgccgcaatcgcactgagcagaatacgcatcggatcgatcgacgtgcgaatgtcaaccaaaaacccgcggcacacatatgagcgcatcgccagcatcaacgcttcgcacaatgaaatgctgatggcggaaccgaccacgccgagctgtggaatcagcagcacgtttgcgagtacggccaaggcaagtccgatcgcgttcaccatggcccatgtacgttccattcctttggaaatcatgacattcgcaagcacgatattcatggccgaacacatcaccgcaataccgacgaatcgtagcggaaccgcggattccgcgaagtcagcgccaccgagcaatgccacgatcgggtcggcaagcaatatcagcagagcaatgatcgcggagccgaataccataacgaaattcatgtttttcgcgatcagttcgcctgcctgccgctctttgcgccgcgcctgataatacgaaaggcgtggcagcatcacgttgccgacggaattgacggcggtgacgagcacggatttgattttggataccagctggtacaggccgaccatatcggtggtgccaaggaagccgagcatcacaatgtctacttgaatatacatgccggatgaaatggatgcgatggtgaaccatagcatcggtttgaaatggcgggaaatattgagatgtccacaattgcgaaagtccacgaacctgcgtagccgcaggagattgagcacgttggatccgtacccggccaccaccacgatcaggccgtatatcgcgtagtcgccgcgctgccgtacaaaagcgaacatgagcaccaatgccagcagtttgaaacatacgctacgcacggtgatgtattcgtattgttccaacgcctgatagaaccattccacaccgaacgaggaaagccagatggccaggccgaaaagcgcgaacagcctgaattgcgcgttcattttcggtacggtgaacaggcacgccaggtagaccgcgaacaccatggtggtggagcatgccagaataaccagcaattccagcaccgtacgcgatagttccgcgcggtcgtcgcgtacgcgagcgcagacgcgcactccgtagtaggtaacgcccaggagggccaccagcgaaaagtatgaggccacggattgagcgaacgccacatgcccggtgccaccggtggaaagcacgcgcgacacgtatggcacggtgatgagcgggaaaatcactgacgacgtggtgacgatcacgttcatcagcacgttgaatttcacggatcgaatacgcacgtcggttggatgcttggccggcttgctggacgactgcccgaccggcttggtcggctgacgttcaggcataaagcaccacccgcttggcgaaggcgcgtttgcgtatgcgcacggagttcacgaagaatatcagcaccacccaaataatgatgtttctgagcatgatctggttgaacatggttgacatccaacggttggagaaaaagctgaacgcacagcaatagccgatggcaccgtacagcatcatcgatatgggaatgcccgccttgccgtattgcaatgcgaaaaccgcgctttcatagcaaagctgagaaagtgcggcgatcagcacgatggcaagcatcgcacccgcgatgccccagtcgaaaatgaatgcgtaatatgtggtgaatacgttgccaagactgcgctcgccataccgttggaagggttgccattgcatccagtcaagcacggttttgccgaatatctgggggaacgaggcccgggtggaagccaatgtcatgtctccccattgcgtggatttgaccgccaacgaaggcgacatggagttcgtgagatacgcgtctaggttttttatcggcgctccaatgtagatggacaggtattcgtacatggtcgagtcgcccgccttgcgtcccatcagcgacagcagtggcttgaacgaagccaatcccacgagcgcgatggccacgaatttcaacacagtgcggaagccgagccgcatgcctttccaacggttgttctgcctgcggaacaacgcccagtatgtccatgcggcaacgccaagctgaatgaggctattgcgtccgccggaaatcaacgtcatcggaacggccgccaacacattgatgaccgcaagataatcgttgcgcaacgaacggaccaccacgctgcgcatggcgagaaacagccacgcataggccatggcgttggtcgccagatgcagtagcgagggaattccagagagggccacgcctttggtgctgaatttgttgagtttgtcatacaagccgatggctttgtccagagagccgtctcccccgtagggcagtgtcaatgagattatctgccgtgacacgatcagcaatgccaaaccggtgaacagcaggccgccaacgtacacccacatcggcagaacgatatcttgcggctcaccgtattcccgatgtgctgtccgatgtccgacgcagctgcggaaaaacaccttcacaccgtaagccgtcaatgcgaatgcgaacgtgccgaatccaaccacgaagcaggtttgcatcgacaggtcgaaatcccaagtccggtaattggtgagtccattgaataccgcgagcgtgaatccgaccacgaatagtatggatggttccgcgaaatccccgcgatatgccactatcagcagcaccagcaatgccagcaatgtcaagaacagtatggtcgaggtcatctcatcaccatgcctaatgtgatgcgatttccggatgccgtcgcttgtacagcgcgtacatcatgccgtacagcgtcggagaggtggccaggagtttccattgcagcagttgacttttcccaatgattcccttgcgttccaccattggcagcaattcgcgcaattccgtacgcgcataccgttcgaattgcgcccattgcttgcgttgatgcgcgagcatgatgcgattgcaggtaccgacaatggattcgagatgcccatatgcggcatatgcttcaacatgcggatatttggttcgcaccaagtcgagcatggctccggtggattgtgcgaatttgtcggtgatgccatgcgactgactgttttccgacattctgtaacggtacagcggcgtggaatcgtatacgatgcgatccgccttgtcgagcagctggtaggtgaccggcgaatcttccgcatagacggcgtcgagcgggtagcgcaggttatcgaagagttcttttttggcgagtttgtcccacgcggtcacataaaagtagccatgctgattcacataggcgaatgcttcctgcgaggtcatgacgattttcttgtcgggaaaagcgttgcagtaggtgctgccgtcagggttttcccgttcgtacgagatgatcgacaggtcggcgtcggattcctgcagattgtgcagcaacgtgccgaacatatcgggaagcacgtaatcgtcggaatccacgaatccgatgtattcgcctttggcaaggtcgagcccggtgttgcgggccgccgccaagccagcattgcattggcgcaccgcacgaatgcggttgtcacgattcgcccaagcattgcactgttcgccggaggaatcggtggatccgtcgtcgaccagtatgatttccaatcgttcgtaggtttgcccgataagactttccacgcattggtcgagataccgttccacgttgtagaccggcactatcacgctgatgaggggttgggtcgaaactgccataagacctgttttcagcagcttttcacgtactttttgcctacgaatttcgccataaggaaaccggacccctttttgatccagtccactggttcggggctgatgataggcatttcgacgtacgggtaatggttggtttccagccatacatcgaagaggatttcgctgatgcgtccgggaaatcgcatttcgaagacgctgtatgagcttgaatcgatatgcttggccagttctccgatgatgggaaacatccacgagcagtattcgttgatgaggtctttgcgcatcacgaacatgttgaacaggtgcgccgaggttttgttcatttgcgcgtcgaatgcgtcgaggtagtcggaattggtttgcgcgataatgcttcgtgtcgcatcgagctggccttcctgcatggtgtgctcgtaatgtgagtatacggtttcgatatagtagttgcgtcgttccggcacaatgatttcgcacgtatcgagcagacgcgcatagtcttgttttcctgcgatgcagctgaagcgttcgttttcgtctccgtggcgtttcgcactgtcatttttggcaaaatgacggcggtagtgcaccaatccctgatagtcggcatcgcagtttttccacatccaatacagtccggtcagttcggaatattgtgcgttcaactgcgaaatattatcgccggtgttgtcgcacgtcatacccaaatcgacgttcggatgcaacgccctaccgacctgcaacggcatatatacgccgtcgatcggcatacggtacgccttatgcgtggccacggccaccgtgatgtcggagtccgccatcactgtcatcccttctataccggacgcgcactactgccaaagcacgcccttatacttcaccctcccccttgtctggagggtacagcatacgttttcattttatctcaacagttcatctagatttcaccaaacgtcagacactcccgttttacaaaccccatttttcaagctttttcaagattattttacaaattatcatgttttgcaagagattgcagacgtttgcatacacgacgtgaaaacgaactgatttaaagctttaatcacaccccacacacgccatccaacacccccgatatggcaatttcaggatcgcctctttcataaatattgaaaatctcgtcacaactgtttcattactacttcggcgtttcgctgccatcatgttgggattacaagaaaaaacgtttgcagatcattgcaaacgattatgaaaaacagggcgcacgactccaatatcacatattgaaatcgcacgcccctgagatctaccggtcagaccggtggatgtatggctttatgaaatccgtttgattccttatttgacggtgatggtgatggttgcggtcttgcccgcggccttcacattcacctttgcggttcccgtctcgacgccgtacacgacaccggttccggaaaccgccactgccgcgccgtcgctccaccacatgtcgggatcacccgtggcgcccttcacggagaggttcgcgagctggcccttctggatggtgagcttgccgttcgagacgccgtcaccggtgattgcgaacgttaccggcacggtgccgtcctcgttcacggtgttcacatcccaggccacgccgacggtcttggccttgtcggcggtggtcttgcggtcggtggtcggatcccacgtggtcttgccgttcgcgtcgaccttgatcaggcggaaggtcatggacttgccggtcttcacgttcgcggtgccggagtagacgccgtcggctcccgtggcggtcagacggatgccggaggcgcgggtccaggtcttgccgtcctgaccccagtcgcctaccgcgtacaggctttcgccgctcttcaagtcggcggccgcgttgatggtcacgtccacgctttgcgaaacctggcgctcatcccacttgagggtgagggtcttggccttgtcggcggtggccttgcgatcggtggacggatcccacgtggtcttgccgtcagcggaaaccttgatcaggcgcatggtcatggactggcccttggccacggtcgcggttccggtcagttcgccgcccacggtagtgagctcgacgccaccggcgcggttccaggtcttgcccttgccttggccccagtcaccgaccacgtaggccctctcgccggacttcaggtcaacgccggtcgccttgaacgtgatctgcacgttcttgtcgtcgtcaggaggcaccaccacggtgcaatccacggccttcaacgaagcagacgaaccatcccacgttacggtgccgccgttgtagtcgatgcccggctgccgggagcccggatactgctggctgccaccgtcgttgaaaatcaccttcgcgccggacgcgagcgaatcaggcacctcgtactggtaaccggtctggtcgcagttgtcggcagccaccatctcgacgcccggccaggccgcgttgttcttcgcggtcgctccgtcgccggtgtacacgtacgcgtacatcttgctccaaccggaaggcttggtcgcatagatggtgttcttcgccaccggcggtgtcggaagcgtgccggtcaccgtaacggtgatcgaatcgctctgggaaccggactttgcggtgatggtcgtggtaccggccttcttcggcgtgaccgtaccgttggcggaaaccgtggcgacggccgtgttggaggagctccagctcacggacgaaccagccggatcggtggtggcggtcagctttttcgcaacggcgccattggaaagatcagtggtgtagctgccaccgttgatcttcacgctggtcaccggagtcggatcttcatggccaccgatgttggccatggcaacggtgaacgtgtcttcgtcggacttctcgtaggagttgttgacctgagaggaggtgtccggcagatcggcattgtcgttcatcgccatgtcatacggcagcgaatccattgcggaaaggccgaaggtggctgccagttcaacgccgagaccgtacttttcgatatggtccgcggtggtgccgagttcgctcagcggaatggcgatctcgtagtgatcgtccatgcctgcggagttgtggcccagatcgttgaagttgacccactgtgcggagccttccttgtcggcgctcatgtcgccgaccactcgaccgttgctttcaccccagccgccgttgatgccgatcacctggctgctcaggatgccgttgccgtaaccgaacttgacgccggaagccttggtgttggtcttggcgttggctgccggaccatattcggcgttggaatcaagacctgtagcgtcgcccttgtagatccacggaccgttggaaccgttggtggaaatcgtcacgaccttgttgacgttctgctcaccgctccacttgatgccggaagcccacagggttccgccggtggaaagtccgccgtccttgcccactcgggtgctttcgtccttcgtgtcgatggcgatgtggaacggcagattctgcgtctgccacaggtggccttggctgagcggataatcgtcgccggtgtcgaccacgtcttgcacgttggtcatttcccacatgaggtacagattgtcgtcatcgtaggcaccatacagtgcatacagatcgatcggcacctcatacatggaattcggtcggtagacgcgcggatcgtcgttggctgcgccctgtgcgatcagcatggagctgtcccaatcggagatgctcgcgccttttccggcattgaagctgatggttttcttcacgccgaagccgactttgttcgtgccatatcgcgaggcgaggttctgtttggcgacttccgtcttggtcaccgtggtttttccggtgagtttggatccgtcttccgtgcttgtgccggtcacggtcacggttacggactcgcccacggagatggagctgcccacggtgatgacgtcaccgttcttgaaggtgccggacttgccttcggaggtcgtgtacttgaggttttcggccttgcttgcgcgcagggtcacgtcaacgctgcttccgctgaatgttgcggaagacggttccgcggaaacgtacggcttggcttcggccttcagatagtaggcgctgaccgcgttgcccttggcggtgccggaggtgatcttgccgccggaaacggtgatgcttccgccgttgacttcatccggatacacgccgtcgtcaaggttggtgctcatgccgacgaggctctggtcgccgcccatgttggcgattaccacgccatcgttggcggtaccgtccttggtgaagcgttcgatcatcaggcaggacttgttggcgttgttctgatcggagccgcagttctgcagatattcgctcttgccgtccatggcgttacggaagtggttgacggccacgaccgacttgttcttccacatgtcgtcgcccgcatcacccagctgggactgctcggcgaattgtgcattggttccgccagagccgaccggacggttgaagtacagcggtgcgccggccttgcgggagcccacgatcgcccagccgaatacgatctgatcattggtcagatacgtggattccttgtcgccattggcatagttgtcatgcgactccacccaagtgacgagctggtcttccttggcgccgccggtatcgatgttctgcaccatcttggtgctcagattgcctgagctgatggccgcgcgcacggacttgccatagttggatgcggtgttgccgccgccgtcggaggaattgttggcgaacaggtccgcataggccttgtagtcgaggccggaatcgccctgcagcacttcaccgtactggaactgcgaaccattgttcaaaatggtgttccaatagttggaggtcttgttgtcgaacacttcggtcggcagttcgacgtgcttggcggcatcgaagcggaagccgtcaacgccgtccgcgactgcggtcttcaggaagtcctgcatgcggtcggccacatactggttctgcgtgttcaggtcccacaggccaagcaggtggcactgggtcacatcgcggcggctggaatagttgatctggtcgccgtcgttaccgccgcagttggaacgggagtggaagtagtctttgttctgccaatcggagtcgatggcgctccagtcggaggtgaagtggttggctaccacgtctacgattacgcgcacgccgtacttgtgtgcagtggcggtcatttccttcagatcgtcttcgctgccgaccacgaagttgccgatggaggtgttcgccggctggtacacgtaataccagttttcggtgaacttcttgccgttggcggcgacttccttgattttgctcatcggctcggtttgcacggaggtgtagccggccgcggcgatttcaggcatatgttcggtgatggttttgaacgaccacatccacgcatgcaggatggcgccgttcttcatgctctcggtcaggccgtactgttcgcgggcctgctcgaacgtggcattgccgaccgtatcctggtagcggtcacggtccgaggcgagtgcggtggaggccacgcccatgccgcccagcatggtggcgacggccgcgactccggcggcggctttcttccacgttttgatggtgcgggccttgcgggccgcctgcctgcgctcgacgcgggtcatcggttcggatggacccccgtcttgcgggggctgttgcttagtgaatacgtgcgcaatacctgcgaacgtacgcgaacttattcgcactttgacctcctgcttccttgcatctttcctttgaaaacgtttgctccttagcgaacgtaatccttaaaatatcacaaatttttggtgaaaaatgagtgatttttaatgaaatcgacgatgaaaaatgattggtttttctgcttttttacaaacgctttcagcaaggttatcccccatccttcgacccccgatatacgacatgcctcgaaacagccacatgcaaacgtttctgaaaatcgtttcaccgcatgcacccgtcaacagcctttcccccgcttcttcacccctcttcagggcaacgggtacaatacgaaatcgtcggaaaacacgaagaaacacggtaggaaaggacagacccgtgaccttcaaccgctacatcctcttccgcatggtcgttgaatttgtgggagccatcgcctgcgccatccaaatgttccagcatcacacgtggccgggcatcatcaccatgggcgtgttcgcgctggtgtgggccataggcgagatctggctgagcacggtgtacaaccgcgcgcacccccgccgcgacgagctgtccgacgagcatcaggcgacggccatccgtttcacgttcttcgtgcttgtggtggcgctggtggtgttgggcttcgcgggcatgatcgtcacactgttcaggcatgcgccgttcaccgttcccgccatggcgttgccgacgttgggcatgctggcgctggccatcgccgacgcccgatacctgtggctcgagcatgagggcggagacaccgatgaagactagtttgaagttcaagcgtatggaacgcggcttgaaacaggccgatcttgccgaccttgtgaacgtgcgccgcgaaacgatcggacgcctcgaacaggggcagtattgcccgtcgctgcgccttgccatggaccttgcgaaagcgcttgataccacggtcgaagacctgttcagtttcgacgacgaagagtgacgcttcggcgtgtcgtttttgtaaattcttcccagaatggcgattttccaacgaaaaatcgccatttttcatattcaggggcatgtgcgaacgtcatcacatggtgtgacaacgccgtcacatatgtgcgattcacctcacatcccccgagagcgcggttctcaacgggggcgtatagtcaaggtcgtagcgggaaaccactacggcaaaccgctgaaatgtacgttttatttagagaggaatcacgattatgaagaagaagatcgtcgcaattctcgccaccatcgccgccgtgttcggctttggctttgccgctaacaccgctatggcttatggcgcgaccggcaccgtttccggcaacgtcgccaccttcacgtttacgggactgactccgggccagcgctacgtggtgtcctacgatgacaccaccgtcgagaacgtcaccctgaccgccaccaagtactccaacgttaaagaggcacacgaggacggcaccctgaccgccacctacaccttcaagtctggctttgctggcaccatcgcatcttccatctacgcagtcgatggagcaggcaatccgaccggcgccgctctcgcttccgcttccgtgaccgtcgccgctaccggcgaaggcaccgccaagaagaacgagaccgcttccaccggtgctgctatcgctccgtacgttgtggccgtcgtgctgctggctgccgctggcatctccctggttgccgttcgcaagagctctgctcgctgaacaataaccaagtagatacacaccatatctatgtttcatgaaggggcttgggttttcccaagtcccttcatttattcgaaaacaagcatcgtaaaaccgattgttttcttttttcaggaagagatcatgaaagtcctgtttatctgcaccggtaatatctgccgctctcctatgggagaactgctcctcccccaattcatgcccgatcttgaatccgacagtgcgggcacacgcgggctcgtttcgcacgaaatcgcaccgaacagcaaaaggctgctcgaccagcatggcatcgattccagcagcttccgcgcgaaacgagtcaccccgcaaatcgcgcagggcagtgatctcatcctctgcttcgaacacgagcagcgcaaggaaatcgcggtgattgcaccaaccgcggcccgcaaaaccttcctcatcaacgatttcgccaacatgtgcgtctactgcaaggaacaggggtacatggagggtaatacccggcaggaaaaactcgaatcggtaatcgacaatgcaagcatgatccgaccgatgatccccgataccaacaatgtggaggatccgatcggcaaggacttcgccgtatatcaggcagcgtacaacgaaatctgcaaggctttgcagaccatagcaagcgccactgcctgaaaacgttgaaatatcaacgaaccaagctagaaagggtgccaacctccctccatgggggtgctctttgctagtatggaacctgatcaatatgatgtgacaaatgtcgaggggaaacatggctgcagcagaaagcaacgtgccagcaaccaatcaggtggtcgtcgaatccaatgatacggaagacgacggcatcaccttgatggatttgttccgtatagtccataagcatcttctggtgggcatcatcacgttcgtggtggttttcgcagcggtgtgcgcatacacattcctggcacccccgaagtattccgcgaccgcgcaggtgttcgccacctacagtgattcgtcggtgcaagacaacaatatttccaacatcaacagcgccagcacgtatatcaccaaccagattcagtcgtatccgacgctggccaccacggaatccgtgctgaagccggttatcgacgatcttggcctcgacaccaccgtcgcgaatctggccgggcagctgaccgtcacgaacccgacgaacaccgcgttcgtgaacatcaccgccgaaacgggagacgcgaagcaggcttccgacattgccaacagcgtggcggaatccctgagcaatgtggtggagaagtcgctgtatgcctccggcaaggagtcgccggtgaagctttccgtggtgcagcgcgctgcggagccgatctcccccagctccccgaaggtggcattgtacttggccgtcggcttggtggcaggcctgattctcggcgtgttcgctaccctgatccgcgatcttatggcaacccgcgtggaggaagccagcgatctgcaagacattatcaacgcgccgatcatgggtcgcatccccaccgacgaaagcctgcagagcaacaagccgatcatcgtgtcgaacccggccggccgtatcgctgaggaattccgccgtattcgcaccaacctttccttcacatcgaaggttgaaggcagcgatgcgcgcatgatcgtcatctcctccgtcggaccttccgaaggtaagaccactgtttccgtgaacgtggcggccgcccttgccgaaaacggcgccaaagtgctgctgatcgacgccgatttgcgtcacccgtccgtagccgaacgacttagcttggaaggcggcgccggcctaacgcacgtgctttccggccaggccaccgtgaaggatgtggtgcagcgctattggaagccgaacctgcatattctgccggctggtccgaagccgccgaacgcttccatgctgctgaactcgaagaccatgaccgaattgctcgacgcggctttgcagacttacgattacgtgatcatcgacacttccccgatggtggtggccaatgatgccactgtcttcggctcgaagagcgacggtatcgtgctcgtttccggtcgcgacgtgaccatgaagcgcgatctgaaagacatcgccgtacagcttgacaacctcaatgtgccggtggtgggcttcgtattcaacctcgaaaaggaacgcaagtcttccacgaacggcaattactactattactactattacgacgaggatggcaagaagagcaagcacgctcataagaacagccgcaagaagtccaagcacaactaagctgctgggcttcagggtttccgccctctatcgcgagtcggaaaccagtctaagtaaccgaaaaggggttgcagcaaatcgttaagattcactgcaaccccttttccatgcccaaattttttgccttcagccggctggcccgcaacttcgcatcagctgcggaggaggatttcctccagggcgccgatcaccgcatcgggcatgccggaggtgacaaacagctcgttgctgaaacggggcgcggtatcgaaggtgcgcagagccccgagcgcacgcattccttgctcacgaatcgcctgcatcgcatgctctttggaaatgtacggcatttgcgcatgcaagagcacgtcaagcacgtcctgttcgactgaattctcggcaatctgcagtccgtctgcaatcgtaacgttcaagcatgcagtagacggcacgtcgcgcacaacggccgacagactcaacgtctgctgatcgtatgtaatttctgcagtatcgcaagctttaccgtcaatttcgatatgaacgttctgcgtgtctgtctgcgcaactccacggaacacaatctcccagttacgctgtgccggaatggcttcagcacagccttccaccggactgatggtgaattgcgtggcattgtccgtattcttccagtcaaggctcatgcgcgtatcggcaacatgagtttggccatcgcaagactcggcagatgcagagccggaagcagcagaagccacagaaccgtcgtcttccttgagtgtgaacgaaccgttcgcacctgggaacaccagcacctgcagggactccggattacccagatcattcaccttattgccctcgccaagctgctgcaacggcacgataccgccagccttggcaaacaccggcatacggtcgatcgcacgccacacttccaaacgacgcccggactctcctgccgaaacgtaacggcgaccatcgaagaagtcataccattcaccttgcggcagccatgcttccgtgctacccagctgcgcggaatcgtcattgtcagaaacgattggtgcaaccagcagctcagtgccgaaacggaattcatccggcacctcgtacgcctgcggattgttcggatccgcccaatacatcggctccaccaatggcatgccctcgaacgcggcgcgatagttcatggtgtacaggtacggcagcatcatatggcgcagtcgcagcgaacccaccatggaatcgcgcacttccgcagagaaattccacggttccttgcccatgaactgcgaattgctggaatgcaggcgattgatcgggctgaacgtgccaagctgataccagcgggcttccaaatgttcgttgcggtacccacacatgtgaccgccaatatcgtggctccaccatccgtagccgatattcgacgcggtagcagtgaaatacggctggaactgcaaggattcccacgtaacaatggtgtctcccgagaagccaactgggtagcggtgcgaacccgggccggcataccgcgagaaggtgagcggccaacggttgttgcgttccgtgcaactcacgttgcgttcggattgctcgacatgcatttcatgctcatcgcgagcgcccggctcggtgcacttttcgcattcgcagttctcccctgcgttgcgttcggaaaaagtcgcgtcgcgcccggaatccaggtagtgcaaatggttgagcacccacagcgggtcaagtccgggctggcgggtcacgccgccttgctgccagtcgagccaccagaagtcaacgccttcggcttccatacgatgatgcatgtcgaagtaggcgcttacgaaatccggattcgtcaggtcgaattccactgcctcttcggttgcgggatcgatgccgacgcgcttggccaccgccgcatagtcgtcttcgaacgcgcgcacgccgtctcgcggatgcacgttcaacgtggctttcaagccacgctcatgcaagtcgcgcaagaacgccttatggtccgggaacagctgcttgttccacgaatagccggtccaaccggaaccgtatttcggatcgacatcgtccacgcggtgccaatccatgtcgatcacggatgtggtgaatggaatgccttcgcgcttgaaccggtccatgagctgcaggtattcgtcttgcgtgtagcggtagtagcggctccaccagttgccgagtgcgaagcgcggcagcagaggcgttggtccggtcagcttgtagaagtcttgcactgcttcggtgtagcggcggccgtagccaaagaagtagaagtcggtttccgcgtgatcgcgtggcataacccaagcccccagcggattcggtttgccgttcacttcgtatgcttccacgatcacgttcgcggcggaatcgtcgagtaccgcccatccgtctcgcgaaatcacaccgtcgccgagcggaatcgcaccattcgcctcgtcgagcgtgcgcgcggtgcctttgagattatgcttcggctcgtcgccgtaatgccacgtattgaactgggtgtcggccacgcccttgacgaccacgcttaagccttctttgctgaatggcttgccatcgtacgtcacatacaatgcgggggtgtcaacaatgagcagtccgtcgcgatgtgtcaccgtgaattgcgggtcggcaccgaaatcgcggttgaccaccatctgcgtgagattgtcttcaaattcgccggaatctgaccattcgaaacggatcagcgattccgttagaatgccaatcctccaatgttccccctgcaagatcgacgcttctcgcatattcggccgcgccttacgcacatagtcgacgaacaccgtgccggctgtgttatctaatgcgttgtttgccatgctactcctgccttacttgctactgcccgtcgcaatacctgcgatgaactgcttctggaaaatcatatatacaataatcactggaataattgccaacgaagttgctgcgaacaatccgccgtaatcggtgccgtattggccgttgaaggctttcaagccgacagcgagcagctgcttgttttcgtcggtaatcatcaagaatggccataggtagtcttcccaattccacaggaaggtgaagatagcaagcgccgcgatggtgttgtggctcattggcagaatgatgctatggaagattctggtttcggatgcgccatcgagtttcgccgcttcaatgagttcgtcggaaattcccgagatggattggcggaacaggaagataccgaatgcgctgatcatgccaggaagcacgagcgaagtgtaggtgtcttgcagaccccagttggtgaacatttcgtattgcggaatgatggtcactgcccaaggaatcatcatggtgctcataacgatgccgaaaagcaggttgcgaccacggaatcgcattttagagaacacgtaaccaagcactgcacttgtgtagattgcaataccggttttcagtactgctacaatcagagagtttgcgaacaatcgcaaaaaattgaacttttcttggatgctcacataattgtcaatcgtggatggcttagggaataatcctccggtcacttttacgatttcgctatttggcgcgaatgatgaaatgaacatccaaacaaatggaacaatggtgatgatggcgacgatgaagagcagaatcgtaagaatgatgccgccaattttacgtgatttcataccagttcctccgaatctccagaaaccttgaacatgacgagggtgagcacaccagtgaacaggaagagcacaactgcctgagctgatgcgacgccgaagttgtatttctggaatgcctgatcaaagatgagatagctgatggtgtaggttgacgtgcccggtccgccttcggtcatgacaagaatctgcacgtatgcctgcaggtagctgatcagtgacgtgatgacaatgaacaaggtggttgatttaagcagcggcagggtgattttgaagaaaatctgcactgagttggcaccgtcgatggcggccgcctcgtacacgtctcgaggaagattcatgagaccggccaaatatagaacggtcgcgtagccgaaatccttccaaatggtcatgatgatgactgccggcatggcccatttggtgtcgtgcagccagttgatgtcgagtcctgtgattttgtctaccatgccgaactgcgggtcgaacatccacatccacacgaaagagactgccacgagcggagtgatggtcggcatgtagaacagaccgcggagggtatctttgcatttgacgagtttggcgctgagcagcagagccaaaccgagaccaagcacaatgcggaagagtgtggaaacacctgcgaataacgcagtgttccccatggaagtccagaagagtttgtctgtgaggatctgtttgaagttgtcgagtccaacccaatcataagtgccaatcagaggattccagttatgcagactgcccgcgaaggctttaaaaattggataggccaggaaaatggcgaaatagaccaccaagaaggcaacggccatgttgcgtagggtgaaaattctcgataccagagattcaccatttttgtttttcattgaatctcgcctctctgtgagtcgattcgaccgttttgttacgcaatacagaatgccggatcgaagcgaataagaagattgaacgtatctcgtagataaaaggcagtcgcggcgcggaagaagaatcgtaccgcgactgcccggattggaaaagggatcggaaaggatatatcggtattacttatgttcgtcgaagtaagcgtacttgctttccattgacgtgaagtcagagctcttcatgtcggtatccatctgatcctgggccttcttgagagctttatcgatggacatgccgttctggaagacgttctggaaagcagtggtgccgctggattcaacggtggatggtgccggccccggccagatcagtcggtctacgcgtggctggatggcggtcatgaccggcttggagagaatgtccttgtcgttctgcagcgaggtcttggctgggaaggagttcaattcggataccgcttcacgaatgtaatcatcgttggcaagcaggtacttgatgaagtcttgggcaacggcctgctgttccttgctctggttcttgttgacgcccggagtggattcgccgttgtaacggtcgtatgcaaacggagtgtcttcggagaaggttggggtggcgaacacgccgtagtcaatatctggatacttttctttcagcgtgccttccatgtggccccaagcgtagatcatcgcagactggccgttaccgaagctttgggtgtaatcgttgccgaagtcaacagatccgaccttgtacttgtcatacaaatccttgaggaactgcatgttttctttggtcacatcgttgttgtagttggctttcttgccatcttcgctgaagagcagttcacccttctgatagttcagaccttgatagatggcgctgtaggcatcgccgttgaagttgaagccggcctgcgtcatcttgctgccgtcggttttggtgagcttttgggcgacctggatgaattcgtcccatgtggtcggaatgtcggcgtcggtgaggcccgcttcgctccacaatgccttgttgtagtagatgttgccggtgttgatcacggagtcgatgtacttgactttaccgttctcatcttcatgtacggatgcggtggagtagtcggattccaaagacttggtgtcgatatcgtaatccgctgcgtatggacgaatcaacgcatcgtgagagttgtggatgttgaaaacagccggaccgtttttgcctttcagagccaacggcagcttggtccaataatcatcccatgaaacattcaccgttttgatggtgacgttcggatacgtcttcgtgtaggactcaatcatcttgtagacaggatccgtgcccttgctgccccagctccagtactcgagctggattggcttgccgtcgttaacgagatgattggggtcgtaggtgatggtgttgccgataacgtcaagccctttgtcggctttcgtatcggttgtgccggacgcggcattgctgttcccgcacgcagccaagccgacgatgctcaaggccgccactgccactgcgatacctttgttgattttcatatctctccttacgtcctcgtaagccttcatccgccccttgcggacaagcaatagcatacgacaagggtttcatattggcaattcaaggttttttaaaatgtaaacggtttcatttgaaacccgtttcatctcaccgctgtgagcgtgcacacattgtttttcatacggcgtgtcgtatcgcaacccttttcattcatctttcaactctgtagccatgaggacggtaatgatggtaggctgaaacaaacagtgaaaaactttcggaggcaccatgaaagcgagcatcggcgatgtggcactgaaggcaggcgtatcgaacgctacagtctcacgcactttcgcacaccctgaacaggtgtcagaggcaacacggttgaaagtgcaggccgcagccgattcgttgaatttcagcgtttccaggtcggcaggaattcttaaatccggtagaacctatcgcatagcgttattggtcggcagcggcatcatcgaatggttcaccgccgaaatcattgccggacttaacgatgttttgcgtgacgccgggtacgatctggtcatctaccctatcgaggggtcggaagcgcgcgacgcattcttcgagaaacttcccgtacgcagcaacgctgatgccgtattcgtttcctcatttggcatcagccccgacgaagtcaaacgtctcgaaaccgcaaaaattccgattatcggcatcaataccaccagcgaaggattcgacgcaactgtcggtatcaacgacaaagaaggcatcaaactcatcgttcgacatctcgccaagctgggacatcgtaacctgctgtatttatatgaaagcttttcctccacattgggattcagctcatttaaccgcatttccggattccaagaagcctgcgatatgattgacggattgaccgcccgcacactggcagtgcaaaaaggcgacagcattctggatgcggcaatttccgaaatcatggcgcaagacaacccacccaccgcattgtgttttcatcaggactcacaggcaattccattgttcttccgccttcaacgcagtggcctttccatacctggagatatttccgtaaccggatttgacgacagcaccttcgctaaggaggctgagctaaccaccgttcgacagcgcccatacgacatggccgtcgatgcggcacaaaaggctctggcgctcatcgaaggacaacccatcgaggaaccattcgagacattccccgttcagctgcaagtacgcggatcaaccgccaagccacgcgccacccctctgctgtaggccgcagcgtgcaatcgcacaagatcgcttcgcgtaatatccccattccaaccggtctatctgcgttatgtatggaagattttgcttcttgtccggagacccgccgcatcaattaagtgactgcaaaaatccattcaatacgttgctgccagcaacacctcggaaagcaaagtcaaaattgcgaccaatatattcggaggcatcgccaagcaatgcaaccgtattaaaacttggttcgattaaggttcgataaacctgcctcgccatttttgcttatgacgaggcaaaatacatccttcccacatggctttgctgctttttgtatcttttgttgttatccgttgccacttatcggcatcggcacggcacgtcagtatcatgtgcgtatgcgacttattggcaatattctgtggctgattttgggtggactgttgctcgccgccagctgggcgattatcggcctggtgctgtgcgtcaccatcatcggcattccattgggagtgcaggcgttcaaaatggcgggtttaacgctgaccccgttcggcaaaaccgtggtgtatggcggcggtgtgggatcggtgctggccaatatcgtatggtttgtgttggctggcatatggatggcgattggctacatacttgccggcctgctgaactgcgtcaccatcattggcattccgttcggcattcaatcgttcaagatggccaaattagcgctatggccgttcggctcgcaaattcgcgggtgatggttggcgtttttgaatgctggcacccacatacgttccccgcttgcctacggtggcatgcggtgtgccacgtctgccgaacgatacgctgctgatgccgtctttaccgagattgatacgcacgcccttgcccaagccgacgccctttacgaactcggaaccctgtggaactctcctttgactaccatctctcgcaatcgcttatatggaggaggcgagaaacaaaccgagagtagaagaacaagtcaatcatctgccgattcggcccaatcgaatcgagaccatgattgctcttcaacagagtgaaatgagatgaatcctgtatacactcaccatatttagcgttttcaccttagattaaccactagcagtatggagcgtcttttattggacaaaaagttctacctttggtaaaatattcttttgttaaaagccaccaatgcctctcactgaagcacactagggtggcatttttcttgctcgaggggactccatggcaaattcgcatgacggcaatgctcaagttctttcctacccgcagcacccaccaaaagatttttcagatctggcagtcactctaattaagaacggcctgggcggagtagatgccgagacccttgaacgccacctcgaacaggttggctattttcgtctaaaaggatactggtatccattccttagcccatcttcctcatgcgaccacaagcatgtcctcccattcagagaggggacacagttccagcaaatctggtgcagatatatattcgatcaggaactgagaactctcgtgttcgacggcataatcacctttgaaatatatctcaaaagctttctcgcacacgagctttccttgtttggcggcgaatttggatataccacacctgaaggattgcctgagctcagctttgatgactacctggcatgcattaactcgttaagggcatcgttcacgaaatccaatctgccataccttaaacatttcaaaagaacatataaagacccattgccaccgtattggatgatagtaggctgcctaagctacggaacgttgaaagggtatttctatcagggatcccccgattctgttaaaagaaagctagcggcgaagcttcatatttttaacccaaataccaatcccgcagtacatggagacatcaagattctctcaaattggctggaaacgattaggcaagtccgcaacatggttgcacatcatgatcgtttctggaacgagaccagtacccgtatcgtcccgaagctgcctaagcatcggaacggttcgcacgccaatgaatggtggagcaacgattgggacgctttcagaacggactctaccggccccgccgccttcctcaccatggaaaactacctgctgcaacaaatcgatggctccgcatggaagaacaaattcatcagcctcatggaccgctatccggaaattcctgcaacggaaatgggattccccgaggattggcgatcactcgcattgtggtcatgacgacaggcacgggcattggagcggtccacaactgggtcaaggcgtaccacgaaagcggaatggccgcgttgcaggtcaggaacaggaacgccgcgcagaacggcaagaccgcacccgcgccgcggcgaagccggaatgccggggacggcaacgatgacgcggaggcgttgcgccggcgcatcgaggaactggagccgaggaacgcgttgatgcgggaggtggtggaggtacgcagaaaagatctgggcaccgacccgcggcgcctgtcgaacagggagaagacactgccgtccgaccgtatgcacccgacgtattcactcaactcgatgcgaatcggcatccttcgagaagacaacgcgggcaagcattcctgcagcccaaacctccttccgtatttttggcaaaacgcctgcattggtgagtgcacgtcggaatcgcaagaggatcaatatcaatggctgctccaccgtggtccgaattcatcaagaagatttctgacaggcaacagcacatttcaccaagaaaaaaataccaatcagagggtagcccttccacgcaggatatcatccgacgcatgcgctccaacaatttcaatcaaacagatgttgagcagttttacatggcatttatcaaagattttgttttctgccgctccgcactcaaaaaattcagccagaaaatatcgatcgcttttgcagccgcatcaattaagtgactgcaaaaatccattcaatacgttgctgtcagcaacacctcggaaagcaaagtaaaagttgtggccaatatattcggaggcatcgccaagcaatgcaaccgtattaaaattcggttcgattaaggttcgataaatctacctcaccatttttgcttatggcgagtcaaaatgcatccttcccacatggctttgctgctttttgtatcttttgttgttatccgttgccacttgtcggtagcggcacggcacgtcagtatcatgtgcgtatgcgacttattggcaatattctgtggctgattttgggcgggctgctgctcgccgccggttgggcgattatcggcctggtgctgtgcgtcaccattgtgggcattccgctgggcattcaggcgttcaagatggcgggactcacgctgaccccgttcggcaaaaccgtggtgtatggcggaggtgtgggatcggtgctggccaatatcgtatggtttgtgttggctggcgtatggatggcgattggctacatacttgccggcctgctgaactgcgtcaccatcattggcattccgttcggcattcaatcgttcaagatggccaaattagcgctatggccgttcggctcgcaaatccgcagcttgtaatcacttcagatcacttcacccaacatagacggccatcgactgccgtcttgcatataagtatcgaggagctgcggtccgaacaggccgtgaccactgcatcctaagcaacgaaacacgtctcatttcgcttatggcagctccagagcggcaaggctcaaaaaactgaacagtcgaacattacctacccaaatgattgctaatgccaaccgccttgtggacaggttaaagaatacttgcgatagcggcttctctaaccgtaagttatctagaagaaaacatccgtaccccgtcaaatatggttacttgcgcagctcgcttgccgcgaagataaacaatggcagcgcggcgaacgcgtagttctcgcactggatatacaggtacacgatcaggacaagccagcagataacagtcttgttccaaataccatgcccagcagctgccgtatcgaagacacgcgtcatggaaactatggaagcgatgaccagcagaaccaggccgatcaatccgtattcggcgacgacgctggtatacgcacacatcgtccatacggtgtccgcattcatgccagccgcgaatcccaccgcagcacttccattcatgcctaggccattcaacaatcgtcccgcatgcttcgcgccggcccataccgcgttgatgatgctgccggagccatatccggtaagcactgtccacggatgggcgagcagcccgcatatcgggtcaagactctggtagattcgcgcgaagaacgatccgtctccttcggcaccgttttccgcaatcgaagatagtcgggaatcggcaagcacgcccagcagaccaagcataaccgcacccagcagctgagcaataccacgcacacgctgtttcttgtcgcaccacgaattatgcacaataatggcaaccagcaacgccaccaccgaatcaagaacgatccgggtgccggcctgcatcagcacggagccaatcgcatacacaacgatgaggttgcgcaaccgcttgacatagatacggtcgcgcccacgcataagccacataagcggcagcaatacgccgaacagatgcatgccgatatagctgggctccgcgaacaggaactgtgggcgaccaccgccccacaccgagctttcattgatgtactgcctgtacatgaggtgcgcgaaatagtcggtcaacggcttgatatgcagatggatggatagccattgcaccacgcccacgccgaaggagaaccagtaagaagcgatgagaatccgcaatggcgtacgccatggaatgcgtttgatgcagaacgcaatggcgatcgcacccaaagtggcgagcacgcccagcaatccggtgatgctcatgaacgcggcattgagatggatgccgaattccagccatcccgggatagacaggattatgcaggccaccggcaggaggaacattggtagataccggttggctgcgatgcgcagttgacgccaattgcataggcagtacacggcgaacagcgccggactgattggcgaccagaacggcgcgtacaggccgagcgtggtgccatccaccggaagaaaagcgatggacagcagcagccaaatgacgttgcgttcctgcgttgtcagaaattgcaggaacggtcggtattgcggtcggtattgcggtcggccatgatggttgctcgcgtcgatggtgtcgttgcgtgtgcatgcctggttcatgtggtttcccctcccccgtcaaccctactcgttcatcatgatgtatggatgctacccgttgttcatttgcaggtgcaacgccttcgtcaggcttgtaggtctggcagttcgtcggcgaatggctcgacggtcgtgaggtagccgagcactcgcatgggccggtcgatcttgtgctgtagcggacaggcggcagcccgtcattattcatcgattaaacgtccacttctcctcaggcttgcggcgaattgttcttccgtgatttcttctgtcaccagtctggaaatgagtttatatagggtatttcgttctggcgctggatcatcatcgatatccaaatcaattctttccattttcaggatggccaaggatatggccattgcggtgcgcttgttgccatcagcgaaataatgatttttggctaggtgaaaggtaaaatgcgccatttgtcgaaacaaatcttcgaatcgttctttcgacgattgaccgaataccggcagaaatgtcgaatctacaacgccacttacggaatcggcgtcattggctctttccacggtaaatccgccgatgtcgtcaagttgcttcctgtgtactcggacgattgcttgtgtcattgcttctgcgaaatcatcagatggaaaaacgagtggcggcgcttggatatgccaccactcgtcagtgtattgctcaggcattgcgcagaatcctgaaggtgttctgccattttgcatttacttcatccaaactagatgcaagagtgtttttggggaaggtcagaccgtcgtcggatgcgagaatggcatcgttggtgatttcgacgttttctccttccctgtagacattcttccaagcggagttctttcgatgggagaatcccacaagatcgaatgccgtcagaaaaccatatttctttgctgtcccatctacgacggataaggcctgttcatcctttgcggtttcgccctcggacttgagaatcctgttgcgcccatactttcggaaagtgtaataaacgtccttctcgactgggccgtaggaccaagcctcgatcttgtcttcgaacaatggctttccggtttcgcgcagagactcgacttgcgcgaaataaacgagcttgttcagcacaagattcgtgatatcgatatcagagccatggcgaagaatgaaagcattcgctacttgtattgacttcatgcccctcctctgtcatggaaatttctatgttcagatatatgaagcttgctttcgaaaggatgtatattaccagtccttctctcaaaaacacaaaggtagcattcaataatgcatttgtcagacgctgtaagaaatccttcattttcagtttggcagcattccgcacgctagggctgtcgacaaggataaggaaaccacatattgttgccgcaaaatcatgcgtcaagggatagctacaaaatgcgtcgaatagtggtttgggatttcgaggtggtgacgttttcttggattcccctcccggtcagggagtccaagaaaacgtcaccacctcgtagtcaccagttaatctgaacaccatcggcgttcaaaatggaccccgtcaccggaagccgggatgcgtccgctcttttgtggaccgcgccgatgctcacgctgagccgttcggcggcctgcttctgccgcatgtctcccggcaccggctcgatcgccttggtccttgtctccagtgggatgatgggtttggccatatggccggcataccgggaatcctttgtcagccagcattccaggcactaccgcctggtcggataacccaggtgcttcaccacctgggcagtggtcatcggcgtggtggaatacaagtccaccgcgcgctgtcgtccctcgggaccggacatacgataagcctttcgttcagtctccaagaaaacgtccgcaccctgctacagcggcaactcatgcagtacctacattcagctcaggaagagcataaggctaaactgttttcgcactaggatgtctatccacctatagaaaatcaaaagcaaatttcttagccatctagcccccaattcttcaggacattgttcgcctggtcagcggtaacctgaactttgccgttttgaattactatcccattgcccttgagcgcaaaggcataagccgcatgatgtaactgctgctcatatagtccatcagtcttatgttgtaattcattatcgttgacatacgaattgaccatatttaggtagtcagcagatttgaacaaatgtttagcggtttggacgtcaacggcatagctaccatcatcttgttctattactaatgcagccgcagaaagaaacacaaattggtcttcatccgcatacttacgaagcgcaagtaacgcatctgtcaaagcatctggcacatccttaaacaaccatcccagcatcgctatcgtcaaacgtaaatcataaaaactcaaatgtactggtaatgagtcacgacctttatcctgaagctgtttctttgcaagagacaaaacctttttctcaaagcgatcaacataaattccccagtcaaccttcttgtccagctcagacggcatctgacttctagctcccaaatgccgcccaacttcaacatcccaaatctcggacaatctgtttctctgccaatcctcttcctgtgccggcaaagaccgcaaaccgcatagcatggctaaataaatatcgattggaaatgcccctatattttcattatcaatacattcttgcaaaagtgcctcagcattagctgaattccatcttttctcgcatgctatctcaaataaattcaacacataaggatagaaatacttttccactgtacttaatgggaattgtagatcaatcaaaaaatgatgcttcaaataaaagcgaagcagcatgcacattctcctcgcattctgttgtgtatcccgatataagtatctcccaattctccctttcaatctaggagaataagcgacctgcatcagatcagcatccggctgagcattgtcaagatttatttcgcagacaaattgtttataacgcttctctgaaatattctccggcgatggaaccagccggaaatatgtgtcaacatgatctttcttgcatattgctcgatatgaatctggaacccgagatagattctgcttgcctaaagctttattagcaaatggaaatagcaccctgacaatttctttccagtttgccggaaatccattaaagatacctgcatctctggcgtcctgaatttcatgttctagtgttttctgctttttcctttgcctgtcaacatacattccactattattatcgacgaattccaaatccgtcagataattacgcttctcgcctatccaccgatacagttccgaacagaatatacgcagtgcggtgatgcctgccaaatccagtagctcaacatcatcgccaagtgccgcgtaatacagacggaaatcattcaggaagcgcatcatgtctcgcttgctccggatgaatggacaaatacactgattgaaaatatcctgttctcttcccagtgacaagttatcgcgccatccgatacgcaagatttcgttctttaatgacttatgcaaatcactaagggacaattcaggaaccacggcaggaatctgaactatcttctcaaggaattcaacgccacgatcatgacttactttatcgagcgcctgcgcaacgtaggacttgtcatagaacaggacatatgtgacgtgaggaagatcccccaccgctttcaccgcctgtataagcgaaccgatttcatcgtccagaagacgatccaaatcgtcaataaagacaacaatcctgtctgattgcgagttgaggtttcttttcaaaacatctcttgtctgacgtaaattatctgcggtcttcgctcctcttcccgacattgttccgccttgtaatgtatcattcgaaagctcttccgaaagagcttgaaagccccaagaaacaactgccatagcaatgttgacgtttgttggaaaaggacaagcacccagaatgtcaagacccagctgaactgcatgcttaaaagctctgcccctatatccgctaagtcgtacacgcagtctttgataccacttcaatcggggagaaaggcccgctgaaatctcagagaacaatgcggatactatctctcccgatctggaatacatccaggcgtcgaattcaatgagatgagtcttacgacttgggaggggcatctgctgaagtcgctcaatgagcatgttcttgatggatgtcttaccgctgccccactcaccttccacgccaactatcagaccatccgaatcgtcatcggtcagaatggcgtaggcaaggttatcgacgtacttcttccgaccatattcgtcgttttcaacatgccgtataggcttatccgcctcgaacattgctccccttaaaacatgggtatatccgctcgttcaatacctgctacgcatattttatgccgttcgttcacgaataacaccctgctgtcattctcgtatgcatcagtcaatatgcaatcgcttcatccgacatcctaaatttgctcctcccgcacatacgggtgagtcaacggatcatactgcagtctctgaagcaattggtctttgggcacgcctagacgtaatgcaacccagccacggaataccagaacaccttctctccacgcattaaggctttgcagccggtcaacacgagcccggtttgcatgtttaatcgagttataggattcagtcatctcgagtctccattgttcgagatcgaaaggccaattatcgccgagatcagaaataatggcatgaagcttattcgcaaaacaagctttgccagccttatctttatccgctcctctctcttggagcagctggtattcaagcgcctcaaatccaatactaagctgcaccacccaagcttcaatagaagcacctctcatagaaaacaatgaaacgatggggtcgattcctcgagcataagtatcccgaagtttaaaccacgaactcaaatcgccgttgcagaaatcagaatacctaatcagataattgagctgcccaacatgcgagtgcattccggaacgtgattcaacgactgcgcaccatctttcctggtacggaattccactttcaacccggagaggatcatcctctctggaaaccgcttctattgaaagagaatgctccgtccaactcgaaatacgaagaagatcacgcatggcccgatgattttcgagatgctcttgccagcgcctaacttcatgagaagcgctttccatataagccaaatcatgaagctcggtcgtatctccagaaactgagacggtccaataaggaacaaaattgaatgcggggatgcctgtcccgatgctatctgccggacgcttaagcgtatattccctctctttcatacgattattgtcatcgacaatcggcgccgacacaaggacgctgctgataccaagccattcgcgcaaaccgtctaaagaagtacgtactgcattgactcttgaatagtcttcccccaccgaagcatcaagcactgcatactccgcgtcaatgatcccgttagcacccgccccgtatttttccttgcatgatctgactttgcaactgagcaaatccactgatccttgagaatcacgaaaccaaatttgtttgtatattttaaccaaatacattcgcaggcaaatgaaatcaactcaacatagctttggcccatgtggcttatgctatgagctggggctttctgaattatgtcttagccgagatgactctgtgaactatagcctgtttcgatcctatggctcggcaatttgcaaagtactcacagctccgaatgacgaatatatgaacatcttcgaaagatcatactggagcaacatataatgttgatgattcacaagacatgtcaattgcaaacaccatcggtagagaaactatctatcttcccatattctacggcagtctgctacatctgctgttcatccgaagcgacaagaaaaacagggggcaaggatccaatcgaattattcaagcagcattacgaatgggaacaagaagaacttgggtttgtctcggcctacccgactctcctagctctgtaccagcttgtcggcaaagacggtacaggcgacaagaaacaataccgaggaaagacgagacatctgacaaagctagatcctcagcaaattaaacatccaaatgatttagcaaaatgtgcatggaacgccgcatgggatatatctttcctatcgcgtctcatttcttatcaaaatggcgaagttactcggatactttgcgggacagcacatccattcccggctgttctaatttcaaaagattttaacccagcatggctttcgtatactactgacccaattgggccggccctccttccagatcgcgattctgcattaccagcagttgaaccaaagtcggatttcttcgactcctatggaactatgcctcctgataaacgcaacgcaacatgagcaaagattctttcagcaaagaaacaaagaactaaagcacctaaatccgctgaggagcgcactgaaatggttctaccatgtatcgagcgcatggaacatgacgcaggcataactccaagtcgtttcgacttactgcaggacaacaacctcgctgtctaagcggattatgcatagcactgatgatgtctgcgcaacatagacaggtgggtttctgcgcaataggagcgacacccttgcagaagatgttgcgaatgcatgatccgttcgaatgcaactcgtgccagtcgcgctcatcagtcgcgcttcccatgtcataagctcaccagagtcaaagaaatattcctaccgcagcaggtacattcctaaataaccgaatcataggcgacacagaacagccagcgggtttcctcatatggcgcacaaggaaacctgctgccgaagcacattgaacagacaatgcgttcacttaatcatttgattatccttcaagtatctctctgaaattcttatatgctgtatcatccttcaatatttcaaccaactccggtgttaggactttctcgaacatacttacagagtcaggttcctttacctttgagagaaggaaattcttgagcataagagtcagaggctctcctatggcagccttatagttgaaaccaattagctgcatagttttaagggtatccacactaatcagttccataaactgctcatatactttggtttgttctttcactgccttaacagcagcttcccctgccctttcggcgccagcaatttgaatatccgtcataatcttcaaaacatttgcaaccgtattatgaagatgctgaatatcttcatcgctgataacgaccttctcaagctctgacttatacgcctgagcaatcctgattgcttcctcacgctcgctaagaagctcattgactatctcgtcatatgtattgcgtattttctcagcattcttctcatcttttattgctcggatcttagctgacacggcagtggccgtacctttaacagccatttgcgccagattcgtaccaagagcaaccagctcagtcgtatatacatcagtcatctgtgtgcctttcatcagatctaataggagcgtccaaactcttctacaataagacatgcgaatctcacacaggacgcgattcataatcttctgtcttaaagccagaatcccaaaatacgcaggaatccgaacattgcctctgctccatccctacaacacaaaatcatctaattaaatgtagacagtgatgcgaagacaacatgatgaggtagtgtccgaaaagttgcgcactttggatcatggccgtccatggagcgatgatccaaagtgcgcaacttttcgaacactacccgccctcacgagctatcatgtagatatgagtgaagatattaaattaaatgacctgctccacctcactgacgaggagatcagcaggacgaaaatccgtttcatgaccaactacaatggcaccgaacccatcaaggtgttcaagagagaccccgatgagctcaacaccgattggcttttgtccagagtgaggaacgacaacaggaaagatgcggagcacctgcacaaggggaataacgtgattggcttggtacgtcttccagaaaacaacgacctctgggtgctcacatgtctcaagcgtatcggggacccattgaaatacccaaaggaaaagaacgaagacgatgacccacactatgtcggctacgagggcgaggaactgaccgaataccgtaaattctacggccgagtcatcgtgcgctaccacaaaagcgcgcaacagcccatacagcatgcggaaggacttttagacgaaatcattgtcgagaaggtcctatctcccacagaatccctatgatgacgccttcataagatacggaattacgtttttgatatcaagagatccgtgcgaccagattgatggtctcgcggattttttgatatgcagactgccatgtggaactggctatagatacactcccactaaagtggggatcttctatcgacttttacgactttccccgactaccagatcagcagcaagcatatgcttgatattagctcatttcaaggcctctattattgccgaagaatgctgattgcgctttttgacgattttattctgttccgaggtcaccgttattgcatatcaaggccgttgggtgttagtcccttttcgccgtgcgagggacatgcggtgaggggcttttgacaatgataggggaaatcaaggtcaaggcggtacttcgctttgatgggcggagccttggcttgatacggagacgaaaccggatgacgaggcggtcgtcaccgtattctcgacccaaccggccaccgaggaatgatgcgcggccggttgggcaatgtgccagcctcagccgcatcgtatgcaacacagtatggatcgatgccgggctcgtgtgttttgtcaaattgaagtagtccaaaacagcgtgtcggtccagtccgaaaaagcggcaggtttcagtccaattgagcgaaagacccgccgccattattgtttggtttctatcccatcagggcgtgggtgcgcctgtacgactcgccctcgaacctgatcatcctgccgtgatgcacggtcctgtccactatcgcggtggccgtgttcgggtcgccgaacacgcgtccccaaccgctgaactcgatgttcgtggtgtagaccacgctctgccgctcgtacgcgttggtcacgacctggaacaggagcctggagccctcctcgtcgaccggcacgtagccgagctcgtcgatcacgaggagccgggccttggatatcgccgagagctccctgtccagcctgtcctcggccgacgcgcgcagcagccgcatgaccagtccggccgcggtgaagaacctcgccgggacgccctcgacgcacgccttgcgcgccaacgcgaccgcgagatgcgtcttgccggtcccgggagggccgaacagcaccacgtcctcgctgttggcgacgaaatccaacgattccaacgcctcccgcccgtagtcgacggggaaacggaccggcgcccagtcgtagccgtcgagttccttgacgcccggcaggccggcctgtttgggcagacgcgcgcgtttcgaccgttccctcgacgccagctcctcgttcatccacgagagcatgaactccatctgggccggggtcgcggcctccaggctgtccgcgagcacctgcctggtcaggggcaggctcctggcgagctccatgatctcgtccatcatcctgccggtcgacgcgcgcctgcgtctggtgtcggccatggtccgcgatgccttcgtcatgattcgcctcctttcccgccggggttgttgaacgcgtcgtatacggcgagcctgccggccccgtcgtccgcgtcgggcgggtcgccctgcgcgatccgtctggccagggcgagcaggctggcctcgtccggggtcctgccgtcctccgcgatcaccgtcatggcccggaccgcgttcccgaagccgctcgccaggctggccctgtgcaggagcgtcagctcgcgtcgtctcgatccggggtccaacgcgtcgagacgcagcacgagcccgtccggaagctcgccgcgcaggggcgactcgccccacgtgttgggtttcctggccagcgcgggcagcagcgtggcggggttcctgaccgtccgtccgccgttcccgtaggagcaggaagggtgttcacgtgcctgccgtcggcggtgcggatctccacctcgaaggctcgaaggcctgcgagcagcgtccatccgcgccatgacgggcccgcgaggtagcggaccgagccgatctggatgttgccttccttgtcggccttgcgctcgacccattcgaccgcgtcgaaacgcgcgcgcggcagcggctgcatctccccgcgctcctcgtcgaacagctcgcatatcggcctgtcggaacggtagtggtccgaatccgcgatcgcgtcgcacctcgacagcagatgcctcgtcagccgcccgtgactctccgcgttgggcttggggaccatgaggttgcggcgcaggaagccgaccgcgttctcgacggatcccttctcgttgccggaatacgggttgcagaacctcgtctcgagccggtagtggtcgcagaacatggcgaacacgcgcaccactgtcaccttgttccacgcgacgcggtggcccgcaccggtggcgttgtcgagcaccagcacgcggggaaccatgccgatgtggtcgaagatctgggccagcccctcgcacacgcattccgcgttctcgcccggcatcgcggccacgtaccgcatgttcgagtgcgggaacgtggcgaccaggcagtgcaccttgacgtcgcccccgccgatcgtggcgacggcctcgccgaaatcaacctgcatgacgccggcgctccagtcgagctcgagatagccgtcgccgtcggaccgatgctcctcgcgccacctcttcacgtagcgctgcaccgacgagtacgagccctcgaaaccctcctcctcgacgagcctggcgtacacgcgtctggcggtatggcgctgcttgcggggcatgagcctgtccgcggacagccacgaatccaccgtgccggaatacgcgtcgatcagggaacgccgtcccttcctaaccgcgggtttcggcgagcagtcctccatggtcgcgtatttcctgacggtatccctcgacatgccaagccgcctggcgatttcacgccatgacacgccctgggcatcgagaatcctgatacgttgttgtatcgacaccggtttcgtcattcctttcctttcccgagcggccctgtgcgggccgggtgtgttccgactcgggaaaatagctgggttgtggcgggccggtgccctttatctcgccgttccggtgaaacggactaatttctattgaacaaacacatccggacctcttcaacttgacaacgggatacagagacacccccttataccccacgagcctaagccccgtcattgtattggattgggcacatacgaaaagaacggcgcaggaacacagcaatcttcgtgcaggaggaaacgatggacaaatcatcatcactgtcttccgacttctcgacctactgatcatatggagcatgtgcatcgtatcgacgcgaaccggccggtgtgtggaagagattcaccatgcccacaacaaaccacagatactggccgttcggacgaatccatctacgtggaatgaaacggaaatacctccccgtccgacaacgattgtcatatccaccgccaccaaaatccaagaaaggatatatgggaaacgtctttacatcactaaaatacgaaggttttacaggttgaaaaccttctgaagggccggatcgatgaaaaaacggcagataggttttcctgctccactttacgagcggatgcttccagtctttccgcgcgatatcaagcagcgcggctgtctgacgttctagcacggcaaggggtcgttctaacggttgcccaatatctaagcaggagtattggctggagtagttttattctgattctgtttttaattagactttttctctgctccatttttttaccgacgcaagtcttttgtcaattcgatcaatgccatcagtgataggaatgataacgataacgattgaatagtccacctctccagttttctcgatgcgcaggtccaaggcaaacaaacgcattagaaaataatgcataagccaaggcacacaatgcgacaaatattgcatgcacgtcatgtaaatagtctaagaacgaatcacccatgatgttttcgttcctggacaatggcgatgcatctcggacgtccagaatgcaacgtgagatgaataccaccgactacattggcacactttttagtaaagaaaaagaaagtgagccaaagaattctgcatgtcacagaatatcaatgtattatcattatgtcttgtggaacagtatgaggacatgaagaacaaaattatccagctcgtcaagttcgggcttgacggcaagtcgaatgattttcgcatgtacgtatccagattggtacgtaagtacagggtcagcgatgcggccttctcgaaaaagttggaatcactgctccattccacaaccgcacctgagacgacttctgttcggagagtaagtcgcgaagtgcgtcttacgagtgagactccggtcctccgtatggaccagttacccgatgaggggaagcctttactgtccgaatggatagcaaaacaaatcgaggaaatgctcgaagaacgcgaaaaagccaatatacttgccaataatggcttgacaccaacttcaacggcaatttttaccggtcctcccggagtgggaaagaccatgaccgcgcagtggatagcccgccggctcggtctgccgatgtaccgtcttgacctggccgaggcgatcggcagccatcttggagaaaccggcagcaatctcaaagccgcgttctcgaaaatacgcgacattcctgggattcttttcctcgatgagatcgacgctatcgcgaagacccgttcggatgattcggacatcggtgagatgaagcgcgtggtgaccgtcctgctgcaggaacttgatgacaggaacccggcgagtctcatacttgctgcaacgaacaacgcgccactcatcgatccggccgtgtggcgcaggttcgaggtacgaatcgattttccgatgccggacacagaacaaatcacgcagatgctcgaaaaagaactcgatacttccggcaaccttggagaggcgtccgccacatggatcaccgccttggggcttgcgctgaagggggtgtctttcagtgaggtgaagtccaccgcgatgcacatcaaaaagagggccgtgcttgggcaatgctcaatggaggatgctgtcatcgagtatgtcagggaaaacgcggacagactgaatcatgctcaaagaatcgcacttgccgtcacgctcgtggagaccggcacggtgacgcagcggcttgcgagcgatatgaccggggtatcacgccagacgatacgacgcaggatcgaaaaagcgaaatagaaaggatgattcatgggaatgcactatttgattgggcatggcgaaaggttgtccgaaccgattgtccttcctcatgggggcaacaaactgaaagacatctatacgtatgaggaatcgcgtgaacggctgcagccggaactgcacgccgtaatcgctaatctgccgaggaatccagaaatcgcacccgatgacgtgcatgtcctgcaatttgtgttgcatccgaagtatttggcaaaatcctaccatccctccggactgattaagatggcgaacctatccctgattggcagtaagccgattcggattacaacatccgacgcttctgaccgcgacgcgcgactatctaggacattgctggtggcaggacatagacaatcgctggaacgctttgattcgctgttacagaatccagttcttgatagagacgaatatagcggtatcggcgatatcgtgaaaatcgaacgaatcagcaattacacactcgctgacaaataccatcccgcgccacccaacgatgactggtacgaattggtactccatcaattggacgagggattggctccggataatatccgtggattcctagccttcgccaaaaaacttggggtggaggtcgaggatgagatgaacttccagtccaatggcctgttgtaccttccggtccatggaccggaagggtccgtcaagcggctcgccgaatataccagtgtccgagccttgcgaccaatgcccagactgaaactcgagccgatcggcaccggtgtgagggcagtacggaggtccgttgagcttccgaaaccgcctgatgcgccaacaagtatagacgtcgcggtactcgatggcgggctgccttcagataaccccatagccccatgggtaaactacatcaaggcgaatcccgatgctgatgacgattggcgagttctgggacacgggctcggggtatgttcagccttgttgttcggcaatatcggttctgggcaacagccattgcatacacggataacagcagtgagagtgcttgactcggaaacgatgtacgacgattcgattgggatgtacaaaacgctcaataatatcgagaacgttctggaatcctactctttccagtatgtgaacctaagtcttggaccggatctaccaatcgaagacgacgacgtgagcgtatggacatcggttttggacgggttattgtcctcgcgtgacatgctgctcagtgtggcggtcggcaataacggcgaattggacgccggaagcggaaacaaccgtatcgagccgccaggcgatgcggtcaacgccctatgtgtcggagcttgcgattccgaaaatgggtattggacaagagccccatactccgctgtgggtccgggccgcagtccaggaatcgttaaacctgacttggtcgcattcggaggaatcaaagataacgaattcatggtgctcggccctggaacctcgccggcagcgataccggtaatgggaacaagttttgccgctcccaacgcgctgcgccaagccattcgcatacgggagatttgcggaccggagataacaccgctgctggcaaagacattgctaatccatgcggcggaacgccgtgaaaatgatgaccaacgcgaggtcggctggggtagggttccctccgatgctaccgaaattgtcacgacgtcggatggacgtgctctcatcgtctataaggggagaatcaagccaggaaagatcataagagccaccattcccgtgccgccacatcttagccaaggcaaaatagagattgcagcgacattctccttcatctgcaaggtggatccccaatcgccggattcgtatacccgatctgcgctcgaagtcatattcaggcctgatgcgaatcgtatcgataaggggagacggaccccgaatagcgtgcctttcttcagtgtcagcgccaaaggaacatccgacttgtattctacggaatccgaaagaagatcggatcaggggaaatgggagaccgtgttgcacgccgaaaaaagatgcaaggcatccacgctcgtcagaccggtgctcgatatccactacaatgcccgcgaggagggcggcggatcacatacgtcggatgagctggaatacgcgttggcgattacgatctccgctccgaaaatcaagaatcttcaccgtctgatactggaggagtatcctcagttggtttccctggaacctgtcattaatgtggatggtggaacgatatgattccaaggccgtgacgatgggacgtgacactgagctgaatatttactcgtattggaaccatcgttattgccgaagaagaccagcagtttcttttgacgattattgcggttcgaggcaccgttattgaacatcaaggccactggccgttaggctccctttcactatgcaaggcacgtgcggtgaaaggagcctaacagtgaccttgatacgcaataacgatggccttaaaacaagcaaatattcaactattctctaagtggccgctttttccgtacgaccatctagagagacctgcataatctggctcatgctgaactgtatgcctaagtcgtctttcatacatgaaacacgacttaggcatagttcctcacaccgagtagcgcagggattataaagtcctacaatgtggaatagcctataccccaaaatcaagcgttgggtctttatgctagtgcatctttgagaaattgctcggaatcctcacgaagctcattaagtcgagccgcatccagcacagaggcaaaaggctcaatgacacttccgccctcaaaatcaggaggcaacagatgcttttcgggtaaacctagtttggtgagtaacgttttcatgcgagagctgctttttttcgtgccaaatgtaaggaatgccttgccgtagagaatagagaacactgttgcatggaaagagtttgataccacgcaatccgccttatcaatcaatgtaagaaaatcagcagggccgattccccatacattgattgcgttcgattgataccgaatcggcttttgagagtaataaacaatagttaatccacgttttgccgccaattggtcaatataatgcaccatatctttattcggccataatgtatatgcaaatatatatttgcctgctttcagtttcttcggaagtttcgaagcctgtatatgccgataatcttctaaattcagcaataacgtcggatcaagtgtttcaacaattgatttatcagtcagtcgttggaactgttctgccacagaaagctctcgtacggaaagtgtgtcaaagcgattcagccactcggaaatatgctttttgtcttctgatgtgaagtttttttcttcgaaattggcatgcgacaagctaggtgcgtacgcaattttctttgttccatcagaggcaaacgaaagaaagaacggaggaactggccctaaggtgcaatccaaattccaaatctgatcgctaccacaaatcagagcatcataatccttcaaatcctcagctagagaacgctctgcaccagccccctcataagttcggctcgtcaggtcaaaacacttacgccagaaagattggaaactgttacgcctacataaattacctgagagaaagagcaaatctgcgacgaatgactttacgcctattccacgaaaaatcttatacgtattgaaatctgcacttcgatagtcaatgacatgtacatcatgacctaaatttgtgagatattttctgagtgcataagtctgtagcgcagaaccaaagttatatgcacaatggaaggtaatggttcctatcctcattattcatctccttgaatccctattttccgatatgcctaccatttttatgcagcgattttccgccgagcacagttgccaaagatttcacaaatggataggcatccaatgcagatactatgcatacgagaagggagagcacaccagaaatcaacaagtatcgtgatggatgcaatgccattacacacgcttgaccagtcacaatcacaatatttatcagcataagaggccagttcactgctatccggacaatcgaatgagccatagccacacgtatgccatacataactaagttgctgccaaccatagcccacgcagctccttgcagtcccataacacggactagcagccatgtcagcacaacgaccacgatcgccgcagcagcggtcgatgtcatcagatgcttggtcttcatactcgcagtaaagactgttccatagaatcctgcaaacacgttaaacagaaatgcaagaatcaagacaggaataataggccacgaatcatagaatttcttctgcaaaagcaacgaagcaagccaaggcgttaacaacataagccccgacgcggcaaggaaacagaacacacggaacaccgcaaacacattgctgtaaaacctgccggtatccgtctttttgaattcctggaacgctgacagactccatgcctgccaaaatgtagaagagaccatattcattacgttcggtatcttgctggccgcggcaaataggccggaggcaccgatgccgagcatactggtgatgaagaatctgttcacacttgtgccaacccaccagaagatagcattgggcatcagcggcatcgaatacagcaacatcttcttaagaaaatgacggtcacgttcctttttaggaatacgtacgtatttccatgagccgccaaatatgatatataagacaatcgcaacaagtccgccgaagattaacgaaacaaaatatccctcgaccttccaattaagcagaccgataagccaacctgccgatagtgcagaaacaagtgacgaagctatagatgcccatgtgatgagcttaatctggttcaggcccctcgccacatttgccaaatacgcgttgaacgcggatgaagcaaaataggcaaggtagaaccacttgtaattcccaaggccaccgaatacgggcagccccaatagcggaagcagaagaagcataatcaggcaaccgaacaaagttacccaaaaccccacagatatatatcgttccttatcatcaagatcatcgatgatatatctcgtggtggcatcgccgatggacagggtgacgacaggcgtgaccaaacctgccaccgtaagggacatatccgtcacgccatactgcgctgcagtcaagaaatacgtatacagcggtaccaacagaaatgtaatcaatttcgttgataccgtgtttaatgtgaataagcctatatttaccagaagatttttatacttacccaagaagttttccttccgcaggatgcttaatacctgaggcttttcagtgaatcaatgacagatttcggcagaatctttttaattgctttcttgatctgcgtctttgaatcagttctgttatcaatggaatcgataaggtctcgtgcagtcctttcatcttcttcgcgagtaaagcactcgaatagaattggaccttccgagtcctttgaagtaaaaatatccttaaccgcattgaattcttctttagaagatgcactaaaatatttgaacccaagagattcggcccaagcgcgagctggtgattgattcccattgacgctctccgctgcagcattgtgacccgctgcagcaatgaatgcattagcagatggtccaatctggctacccacatgattggaaagtttaaatgtcataccaagaccattattgattaaaagaatacgcaaatttgggctgatttccctgcatcccaaagaattcatatcgtagaagaatgccaaatcgcctgtgatacaaaaacataattcacgcgtagacaggcttgctccgattaacgttgaagtgcatccatcaatgccgaatcctcccacattcgcgcttgagcgaacatctttcgggagagggaaataatcccagcttgataaggagctcagtatggccggatgaacaattgaaccagcgggaatcatagaatgcaattgctgagccatccagatatttgaaaacgggaattccggcatacggtttcttagttgaatatcatagttctcccacttggcacgataccccgactccacaagtttttgacttgcataatgggaaaagaagaactcaatcgagcactggaaaatatttttaagccgagcaaaatgttgacggaactctccgtccagagacactctccaaaccgggcaattcagacccgtcaaaaatcccatggtgttatagtcacctgtcatctctccaacatgtataaccaaatccggttcaaaagcagagcgtatagggttattctgcaattggatacaggcaagcgctgatccgaatgcgaacttgccatgataaccactagagatgtcagaaaacactactgcgtcatgcgtctcgacaaaatgctctaacatctcagattcagtagcgttaaaagctcgatgcgcccccaaaagaactgcgattttagcattatccggcagttccggccaccctgaaacttcttcaggaagaaatcggcttattttatttaccttagggagagaagtcgcactgaacgtgtaattgccgtcagtaataagctgaactgccaccggaccgctaccatcacgtgtaagctcagaaagcgcaatgttgatgcgcagctcctcatctttggccattctctcattttcaatcatctccagagaagtatgataacgagcaatgtcattgggaataaccgaacgatcgagaatctgagtggacagattacctatgtcctcagtgaaatgcatagaagtaagagccagaacagggagtttacgatagaacgcttccgttaagcctggcatataatcccgcgaagccgtagcgcctgtacaggagagcaccactggttcacctgattcagcagccaaaccgcatgccatgtacgccgcagatctctcatcgatagcagagtaaaccttaaaaaaggagtcactctgcacgctgtatacaaatggaacatttgttgtacccggagacgcaattatattccgaataccatattcttttaatagtgcaataaccaattgcgcattacgcgcatctgtatatttcggcattatattctccattatattttatgcagaattttcttaacagtttttttaaacagattattaagcctataataaagactaagaagattgattttcaacatgaatactctgattttattcaacggtttcatttgatgaagagagagagatttcaattcttctctaatctgcatacgtatccagttagctccgcgtatatcatcaagcgcaagtaagtgtttgtaatgataaaacaaatgctgaatcatattattttgagccatatgaatataatcatcacttttagtttttttagcccaatcaatcatctcatggaaagcaagaagctcatcttgatagtacttcatcgctttcatatgattcgatgtaagttctccaagtattgaactactgcggactcggtattcatacaagcaatccgacaaaacagcacatctcttcgccttagccacaagcttgtacgtcgtcgccagatcttcagctttgcgtccttcggggaagcagatatcagaatataattctttcctgcataagaactgccaagaatgacttgggatcttgtcgcttagaattgttggcaacagttcttcatcattcgtgagcgtatccggaaaattctttccgcacaatactccgttttcatcaattaatcggtacccataatgaactaaggaaactgaatcattatttaacaatgacatgcatttagaaatcaaattttcatcaatacgatcatcagggtcaacaaaaagaataaattcgccctgcgcataacgtagacctgtgtttcttgccgccgaaagaccgccattcttttgatggataacatgaatacgtccatctttggaaagccaatcatctgcttttcttgcagtatcatcagttgacccatcgtcaacgacgatgatttcagtattggtataggtctgggaaataacacttttcaagcagtcgtctaaataatttgccacattatacgctggcaaaatgatgctgaccagctgaccttccctctgttccatccgtttcaccttccatagtctaataagcgcaaacaggaattggcgttgcaacagttccttgattgttgattttctttgccggcacaccagcccaagtcgtgtcaacttcctttatcggtttaattaccagcgcagaagctccaattcttacattgtcagctacagtaattcccccaagcactttcgaatcaatcataagctctacatgatcaccaattgtcgggcattctccatgtgcctgtgcaataacaacaccactcgaaagtgcacagtaatctccaacctttgattcaggattaataattatcctctcaggatgccaaattaacaatcctttaccaaaaacattaatgggaatttccgaacagaaacgtcgatcatatctctttgtcaaaaaaagataaactaagtatgctagcctatgataaatattcttggaaacgttgtgatggtactcgcatttccttaagtattctttccagcgaaccactgctccgctcgtacccagataacgcttcacaaaagatgaaggctgcggctgcatacgcttatcctcttggatatattccaataaatcagcttttgttctaatcatcaaaaagtccttacgttttatctcttaatacaatttattattttcaaaacaagaaaagcaagataacagaaatcgtgcataagacaaaaaacgataatagaattgtcaatcctcaattgacattgttgagcgcgtgccaaacatccctcatcatccatcgccttacgtatcgaacgaaatacatcaccgaaagaagcataggagaggtacgaaacggcaatcttaagaagattgatatactgcatgatctcgccgtggcatgccgtttgatagcaggtgtttccccatttcatagcaaaagacaggaaacgagcatttacttttctgatatcggatagctgactggacttatatctagccgtactagcgaaatcattaggcctataaaaatagagaatcctatccgagctataaagcgagtgggcactatcaaaaacaggaagaagttgtaaaagatcttcaccgtgcatcaatcttgcatagttggaataatcagcatcacgatcaaaacatgaaagttttatcgctttgccccacatctcattgaatcgccctttgcagaaatgaagtctagcttcttcaaatcgattaccatcatacagcccgaccgctaagggcgaaggtgaatcagacgtcaagaaatcatcctgccgagaatatctaaaagagacaatatcaacattgtatttatgaattacatcggcaatatcccgcaaagctgtagaacagagagcatcatccgcgtccaagaaaacagcatacttaccacttgctgcttgtaatccaactctcctagcaagtaggagcccttcatttttttgatgaatcacatgagtttgagaatttttttcagcaaataaatctgctatttgtcccgtcttatcagtggatccgtcatcaacaattatagtttcataatccgtaaagatttgtacatgaacagattccaaagaattatataaatatttttctgcattaaaagcaggaataatgatagagaatagcattataaattcacacctttatttgaataatattttttactcaataaaatgcctaggcaaattgcagggaaaatttctatcttttcgaattgaatcagagatagagcaaagaaagcgaacagaaagttttcaaatggatttgcaaatttatgcttaaagatacaattaaaacacagaaaagcaactaaacatgcataaaacaccccgccagccacaccagtttcaacagtcatctgaaggaatagattatgcaaattatcatctactatcggctccatccccgccgtatttgcagctactttattcactgcagaaactgcattccccaaaccaacgccaaaaggatgattatagagaaaaggaagcgcgctatcgtagataccgatacgtcccgcagcacctttatcctcttggttcctaaaaaaacgatctaaaatcggctgaaatattccaagttttaaggcataaaaagaacaaaataaaagaacaatagatattaagaatataattaaaaaaggattctttgattcccgaagccttttatatgcgtatatagccagacagattaacgaaataataatgccagctctactaacctgaacagaagcaaatataaaagataaaacaagatatataatcccatagggactgtctagaaaaaaaatgccatacatactaggccatgatgcttcaaggttggcaccacctccatatatggttggatagtatggatgagcctgataatatccagatgaaaaataacctaatatagcatctttatgacaaatcgcatttaaaacaacaaccatgaacgaaagtattccagcaacctggaatactttctcatacgattcaaatgagatacttttccctaaattaacaatgacaaaaataatataaaatacaaataagtaattaataatgaatgtgtccaacccccattggaagccagcaaacagtgacacgcataggatatacgatataaaaatacatatcacagcaggcggaaattttatctctttaagcttcggtaacagaaaagggataaagcacaacgcaagtagatgtcctggatttaatgggccgaccagtttaacattctgaaatgcagacccaaccaaaaccaatattaaaagtgtacaaacataactgtcttgagaccgtttgtctgtgttagagaatattttcattttcttaccagcttataaacacatctgcaaggaattgaacctaggaaggacagcaatgaagcgattctagcatcaggcctcgcttctccgtcccttaaaactgaaattctattttttttgactccattccacaagccatctgctatttcaagcatttcttttgtatcgtcaggacttatattcatatacaaattaaacaaagcgctctgttcttttgaatagtaagcgttaatggcactcggatattttgtctgtactatcgacttaacaacgttaagctgatcaagtaagtcaagttttttaggattaaagcttgatgtttggatgctattcggacgaatcctataataatagtcgttctcatccaaatatgcgattttaccagccttatcaataagcttggtagtggtggcaatatcctcatataattttccgacaggatactgaatcgtgtcgaataattcttttttatatatttttggaaacgcgttaggttccaagtgcctcatataaagcatatcttcaagagcctcgcacgcatcatatacatgcaatttcgccgtatcgcgcttatgctccttaggaggctccccctcacggaaaatacagatggaagtggttgcaatatctgttttccctctgactagtgcctgatacaaatgcattatgtaattagacgatacataatcgtcactgtcaataaaagaaatcaaacttccatgagatcggagaatgccataattccgagcgtcagacaatccaccattcttcttatggaaaacacatattcttgaatccgacaaggcaaattcatcacataaagttcctgagctatcagtcgaaccatcatctacgagaataatttcaatattcgtgtaagtctgttcgaccacactcgccacacactcatgtagataaggctcaacgttatatacaggtatgacaactgaaactagcggatccatactgcttttcatttcttctcaaaaagttttaaatacattgaagttagcttttgagcgttctcagaaatatcatagtcagagaacacattttcagaggaactgatacgcacccccgattcaattgccgatataaacgagatccattcttcaggcgatgttataggcatgaatctagacgcacctgttacatcaacttctcgtgtaattgtgtcggaaaatagacatggaagtccggctcgttgtgcttcaacaccaacgacgcacaatccttcgtaaagactgggaagacagaacacatcgaacgcctggtatagacgattgacatccgagcgttgaccgaggaatagcacatgatcagcgataccaagttcttcaacatgttgttgaaccgcagtcctgtcaggaccatcaccaacgaaggcgagcatgacgtcagggcgtttaggaagcagccccgcaagcacatcaaccagaaacgactgattcttctgtggcatgaaacgtccaacatgaccgatcaggaacgtatcatccgaaatgccgagctctctacgtgtttgtttacgcgtttcagcattaaaacggaatttatccaattcgatagcattaggaatcacggtaaaatccgcatttttgccaaataaccattttcctgcataacgactgcatgcaaaacgaaccgttggatacacattggcgaacggacgcaacacaagtttcatcgcgttcttcgcaaactcgcctttgcccatagtcgaatgagaatgagcgatacgaacaggcaccccaaccttcttcgccgccgatagcgggaacacgctcaacgtattgatattgctgtgcacaatcggccactgctgttcacgcatcaagcgaatcagctcacgacggtagcggatcggatgctggtacggcggtatacggaatacacgacctcccaaggcggtgatttcctcttcaggaacacgcgtggaatcctcgtcaacaaggaaatcgaactgcactttactgcggtcgatgtggcggtagtaattcatcactaccgcctcaacaccaccgccattcattttgccaacaacttgagccacacgaatcggtctttgaacactatacctgccgacatccgtgttacgaggtcgcgtatcgctatcacccatgttatatataacttcccttgtattcccggagctcctcaacaccagaaaactgccattactttctgtttttagttatcctgcgttccgaactcagtatgcgccattggggtgcaggaccgtgccgatagtacggagaatgtacacgatgtcccccaacaccgaccaattctgcacgtaggaaacgtcaagctgctggctttcttcctcactcaggtcgttacggccagacacctgccaagggccggtaataccaggctttaccaacaaacgagtagcatacacctgatcatattcgtccacctcaaactgacgttgcggacgcggcccgaccacactcatcgttccgatcaaggagtcgaagaactgcggcaactcatcaatactggtcttacggatgaaatggccgaccttggtgatacgcggatcattcttgatcttcacacgtgcacccatctcctgaccattcgcggcggccacttcggcaagtttggcatccgcattcacatacatcgaacggaacttatggatcttaaatggcttgccacgcagaccaacacgttcctgcctatagaacaccggccccttgtcttcaagcttgatagcaatagccgtgataatcataaatggagacgaaagcacaatggcgatcaaagaaaccacaatatcgaatacacgcttcttaaacatatcccatggcgaatactgcggtaggctgatcgtcatcaccgtcgtaccctgaatcacacggatattagtctcatgaccactcacgtccactgcggaagtgaccaccgcaatctccagattcatggtttccatgttcagcacgaacgtgttgaaattatctgagaagcgctgcataacatccgtaaccatcaccgtctgtacgcccatcgaagcggcacgttcggcgaagttcccgcaatacggcaatgtggcgatgtccctaccactgatcttacggattcgttccttgaaatcggcagacgcggcaacagcctccacaagcccagtccgcttgttcaaaccaatcgggcacaccgcaatagcatgataattcagttggcgcttctggctcaggaacgccaaagcatgctcaatgccctcaggggaaccaaccactacggtgccatacgaatatgcgcccttttcacggctggacagtacaaactggcggatagtcaaacgctccagcatggtaatcaggaatgcgcacagcaataccaagccggtatgcagcaaaggtatataaacgttgagaatagaatcgattgcacaaatcatcaatcccgtgaaaaacgtgcctttgaccagtagcgcgttcaactggtaaccgtcacccatcacatgacggtggtacacgccaacactgtgcaggcagtagatccaaatcaacgagcaagcaagcgcatacaaccacagaccgatatgaaaatggaaacgggaagaatacaacgcttccccgccctgccacacatatatgattgccgaagcgacaataaatgaagccatgtcgcacagaatcaaaagagcattgacgaaaaaacgccaataagcgacgctaagcacccggttacgggaggtttcactcagattcgtttcagcactaccgccttggaacattcttctctccacaactaccccccccccgatatttcaaggggcaataaacgagggtacacaaactcctatacaaagctataagtgagcatctacctcaaattcacctaccctcaatgagcggtatctgacggggagtaagaggttctttagtattctgggcagactgcacttgcagggggatgtcatactcctccccggtttcaacgcgaccttggcaacagcaagcaccagaccatcatgcacggtcacgccttggtaatcatcggaattctggaacttccaatccatcaagcggccattcgccggagcatacaggaacagcacggttctgatgtcaccgggctcggttccatccatgccaccggtcacataattaggggctgttttccggttcctcagcagtcatcaagtacggaaaaacgtatgcacccaacggaaacgccttcacagcctccgccaaaagtgcctctctttcggaccaagagaagaacctagcgaatcagtgaaggcgtcaacaaacggatcggccccacgcgcaacagcactaaatcctgttctttattccagccttgtcataggcataagagccttcttcctccaaaggagaaggcttaacggtgtgtctcagcacttcgagaagccagatcgcagagcaatactccgatcgtcggattgaagaaattcggatccgatgatcggagtgcggtttcatgtctgcattactagcgttttgcgtctatacagctcgagaaaagggcggaaaatactagttgtgcagacgcgacgaccgcagacgggccgttgcatatacgcaaattgcggaagcgatcaccagtagcagcgagatgatggagagcgcttgaacggcggatccggagcgaggcatttccggcttctccggcttctccggcttttctggatcgctgggtttgccaggttcttctggctcttctggctcggcgacggctttgatggttaccgtcacttgggcgcttatgccatcatggtcggaggtgcgcaactgtatgcccgctcccctactcgagtttgcgtctataacatcatccgcaccattgcgcacggcggtgatggtgatgttctggctcacggcttcgaaggctttccttttcccaaccgcctgcattgcgcgatcgatctgatcgttcaacgcctgcaattggccactatccaccacaagacggtagtcggcgatgccgttcagttgtgtttccgtcaactttagtaggtcgtcggcactcagctgctgaaggccgctcgctggatccaattccaccgaagtctgcttgctggagatcgccagatcgccgacatggaacattccgtcacccgtaccatcaccgctagtgccgcctagaatcagcccaagcgaatcagccaagtatggcgcaagattcgacgagtcggagaacgagccgctcaacaaggcgagcgtgttcagcccagctgggatcatgccccggtattcgccaccgcgaatggtcacatagccaagatttttagcgtcatccagcaagttgaatagcatcggcgcggtgaacgttccgccagaaaaactgccttgcgcagaagtctcatccgtttcggcaaagcgcatcagtgtcgcgtctgaagtgaacatgccactttccacgcgcaatgcgccacgacagtcgaccgcaggacggcttccgcccgcaaccgttcccgggccgacaatggtgagctgcatgttcgcaggcacagtgatcgcagcaaacccagcagctccaccggattcagcggcttgcagcgtatgcccgttcaggtcaaacgttacgtttcgtacgcctttcggtggcgtaatcgtaacgctttccgtcacgtcggctagcaatgtgaccgtcgtgttcttcaacgttgttcggctgatcgcctcctgtacgctcgcgtaggttgcgttgcccacttgcgcgaccgcctgagattcggcggcatcggcaaccgtatctgtagagaacagcagcgttccaaacagcgacgcgatcgcgaaaacagcggtcagcaccaccgaaaccaaatacttaccttgcgttcgcgggcacatattcacccgcttctcatgactacgcatgattatttccttttataggttctattgcatatttcaatccgcaccgaagtgcgtgggaccaccctcagctgtgagggatgacgttacagaaatcatggcgccatgttgcattaattatctcataatacgcgaaggaaagcaaattacctattttgaaaatccaaatcttatatgagatatatcaaaagacaatctttagttatagtggacttgattacataagttgaatctgtttcacatgagtattacaatattccccataaaaataaatccatcatataaactgcaaaaatatacgtgtgacaaataattgtttcccatcaagaaacaagtgaggctgaatccaaacaagcgaagccatggctaaaacagcgcggtcgcgaccaaacaaactccaccacacaaaaacacatcccccgcctgcacaagtcaggaatacggcgtttcagcgagttatgcaaagtagcaccaactgcgcagacgtaagcatcacaaatactagttatgcacgcacaaacacaaatacggagtcatccccgaaaaagaagatgcaaattagatccacgctgcaacgaaatagtcccctcacgaagatgagcccaagtctctacatacgtcccagcaatagcaatcaccggttcactgagatattccttaagcccttcaagattatctatataacgtctgcggaatagattcgcaagcaccactttctgcctgtccgttaagtcaccgtcttcaccatgcagcgcatgctccatattgcgtgaaaaataaaacacatcaaacggcacttcatggcgtttatacgtcagatgccccgcggttgacagcttccacatagcagcgcttttcctacggttacgagcacgaatccccctcacattatccgtgactatacgcgactcctcataaacaagccgcccatcctgcgatccctcgacaacggcatcttccggtatgaaggcgccatccgtatcgcatatctgaacgatgcgggaaatatccgtccatctgtaaccacgatcacgctgcaattcgttaatcacgaattttcgcactgtctcacgaggatcaacgccgttcgccttagtggtaatatccccatgcactacatcaagtttgacacggtcgttttgaaacagttttgcaaaaatcccgcccaaggcggtttcttcggtggtgccttccacaatgaaaagtactacgcttttagctctctgctccggcatgtcaatcacccctcttccagttcggggaaactgacgtcatagaacgcgctatcaatatcaaacttgctagtcggctcatacacagtctcaggctgaccccccaaattaacggcgcgcaaatactgactacgcaagttatttcccgccctgcttccatggaacttgatataccgtcgatcaggattcgttgtagtaataatcagcgatccatgattcaacacttccaatggacgcaagttatgagctgtgaaaatcagttgaccggcaccatgctcctgaagaacctgaagtaattcgccaagaagaaattcaaaaacaccggaatcaagctcatcaatagccacgcacgcactaggtttagcatacacgtcaataagcaaggtcaaaattgaaacaagtttctttataccttcagattcacaacgcaaaggcaccgtaatagaaccacgagtacacgtcatttcaatacgttcaacaacctggcccttgtcatcaagcatgttgcctaaatccacaacactgagagatagcccaggaaccagcgaagacaacacgggattcattttgcccacagtgttgttcaacagcgccagctggtcggatgtcaagactgcaggctcagtcaaatcaacatcaaatgacgcattggcaagcttgccatattttccctcatgcgtagaaatacgcatgtaattatccattgaatcggcatatcgcgaagccatcactacagccaaatcaaataggccaaacgatatcagacttttaatcaaagaccgcaacaaatcaatcgtctgacgatactgttgcatagtttttcgcgaagattcatcactgctctgaataatttcgttaagaacggtaaaaaaatcatccgaaaaaatcaaagaagtctcttttgcttcagacagtctacgagccacagccatatcggttttaacatcatcacttaaggctaacaaatcatgccacatcactttaggacgaaaaccagatcgctgtgttcccccataagaaagcaaggtctgcataacggatccttcactaccaaaccttttaaacgcaaggttttcaccagatattaccgccgcagcaacaccattctcgcccaatgcctcacacaacgtcagttggtaacggaacatcccctgtgcctcttgagaatcgtcttgaaaaacaattccctcaaatgtcagtctcgactcagctgaatctttggaaatacagtcttgagcaaaatccgaaatcttatcttcagttaaaaccgccttcagtattcgcaacgcctggaccacggatgttttgccagatccattttgcccataaataccgataatatccgcagaaggcatcggctcgcccttcttccataaggaaagcttgacagtcccatgacgcacatttttgaaattatccaacaaaagagacgtaagccgaatcatagaatcctccttaacacctcgctaagtttacctcagaaatgaaaataagacggaaaaaccgttttttcttacgtttttcgtaatatttttatctatctgatagaaaacggtactaaacaggagatcatcaaattacatgcgcatatacccgcatactcacccgtactcaccctgttgcaagatgacttgtctagcctcttgcttgacgatttggccgttttacggccgcctgtttggccgcttaagctgcctacggaactacggaactgtctagcggccttcaatcagcggggtctggcggagggtgagcggctcatccgtatctggagcggactgcacatgcacggtgatctcataggattcgccgggctgcaaggtcacatcgcccacgcccacggtcaggccatcgtgcaaagtcacacccttgtaatcgtcggcattctggaattcccaatccaccaaacgaccgttcgcaggcgcgtaaatgaacaatgccgtcttgatctggcctttcggaacgatatttccggcaccggtcacatagtcagcttcggaagccgcttcttccgccgttatggtgttctgcaacttgatatgcaccgtatactggttcgcgccgtttcgcgcgaccttctggaattcagtggtcacttcgcgatgcaaataccagtccattttcgactcggtttcgtcggaaatatacacgccgacctgcggtttcgcaccttccgtaatcaatttgccggaaatagcggaatcggcaatcagattctgctcatcctcatgcgcgctccacaccatcacgtgtccctgctcaacagacgtggcaagcgccttgacatacgatttgaaatcgcccgcattctgcatgatatggtcgaacgcggcctgcgcggcaaccgcgaaatactcgtctgtctcctgcggagccatgcgcgcatacacgtcatgcagcaacgtttgggcggtattagtgccatccaacgtcgaaccgtcaggcatgacaacgccaccggtcaccgccagcatgttctgcaggaacagcggatcaatggcgatcacgccatcaaccgcaacgccatactggcgattccacatggcgctcacaatctcgccggtgcgcggaaaatcaggcgtgaaattcacgtcgcgaatatccttgccaagcttgtcggtaaacagcaaacgttcctcggctgtcaaatccacaaccggctcatcggcattctgaatttccgaatcggaaacgaacggctgcaagctcacgtgaccaccctgcaccgtgaccaggccgagcgatcccgtaagaccgccagacgggcgtgcctccgcattcgtttgcgcaaggatcagataattgcgcggagcatcattcgcatggctttccgtgcccaacatgctgggcagcacctgcacgatggaattcaaggaatgcaccatgctgtcaagtttttcgcaatacgtttccgcggttttcagggcgtccgcgacctgcgcgatatgcggggttttcatggctttcacggttttcacttcccgcgtggccttgtcgatcgtatcgtccgcgatttggagcggctgctgagacgcttccaatccggaaatttcgatcgtgccgttttccacgtgaatactgttcagatcaacattttcggcgactttcaccagttgcggcaacgcctgcgacgaaatattctccatggcggccaccgtggtgcgtacggcggaaatgtcattgcccacatacggcacgaccgaggccacctgccacagcggcgaagaggtttgcttgtaggccttgcttacgtgatcggagaacgcggttgtctgcttctcaagcttggacgtgtccgcttcggagatggtctgctgcaagccttgagcacttgacaccgcctgctgcagctcgtttttcacgtgcagcgcagaccatacgaatgcgccggcgaaaacggcgagggctgcgactatcacgagtacgccgattaggatcttgcgacggcgacgtttgcgcttgatttggcgaatatgctcggcgctcatacggcggcgcacgcggcgggaatgcggggcgctggaagtggaatcttctggactggcggttgcgtcggaggtgcggttgcgtcggcggctgaatcggcattagactgcggctcctcctgacggccttgctcaggctggacgccgaattcttcaggctgatcagacgcgccgttcatattccgtttcgctccctaattgtttgcaagcacttcggattccccagtgtaatagtagggggagtcgatgaaacctacggagcaaaaacggggcaataacggcggtattactgctcaactgttgccggtaacgcaagaactgatgcaacctaaacgtgacctgcaaaccagtattgctacaactcaagcatgacccgcgacggcagcattactgaaattccaacgtcgccaataatgccttgtggtcggaaccttgaatccgcttggtttccaaatttctggcgtacacacccttgtcgtagatgatatggtcgatttcagcgatagggaataccgaaggatacgtcatatgcaatccctcgccggcactctcccccgcatccgtaaagcgatcgcccaacaaatatctgaagcttgcatgatcccacgtggaattaaaatcccccatcagcacatacgattctccattatcgtaatgctgtaattgcgctatggaatccaaacttttattccataatccctgattgcttggtcgtggagaaaacggatgaaccgacccaaatcgtacttttctgccattgaaatcaactgtcgcggcaggaatactactggattcaataggaatgagatcctgcgttgtttcctgcagaggatgcgcactgtacagtacgttcacaccgccattgtcgtgccaagtgagttgcgcggaaacggaatacggaagataatcctcaattccagcatcatgcaaccgatctaataatcctgatgaaacttcctgcattgcaagaatttcaacatgctcgctttggattgttcgcacgatttgctgcgcatcggcacaaccttgcttcgtattgaacgtcatgacacgcactgttgcagaaggttgtatggcacgatcattggtcggaacgacatacccccaatgccaaataatctggatgatcacgcacaatacgcttaacgcgactaaaagttttcgtttgccgacagtgcgaaaaactgttgcaataattgcgataatcacggaaagcaagccaagccaaggcatgagtgcgacaatcaaaggcacgtaccgtttgccatcgagactgttcggcagcatgcgcagaagcatcgcgaacacgatgatggcggatgagaaccacagcaacgccgtaagcagtgaagcgcgcgtttcacgacgcgtctcacttcgttggacatcgccaagtcgagtcatgcgcactcctttcccattccatcttcccgtttcacttcctattccgcgcaatccgcaatcgtatgcaatcacatgttgcaaccgatagtcttacgcatcgtttttcacaacatctctcacaacatctcttctcgtgaacgctacccgcgttcatccccgcatatgtttcccgcatgcattgagggtgatgctttcacaaaagtgccactatatggacactttccggcatttggaatcgttctgatacgttcatccgataatctataggttgcaaaacggtgcttaacaaaagaggcaatcatgagcgaagaagcaatgcgagaagaagtggcgcaagctgtggaagtggccgcaaacaaggccgccgaagaggaaatcagcaaactgaccgaattcgaaagcgccatcgacgaaacgctcgcctccggatatttggacgatacgctcaccgtcaccgacgcagacggcgtggcgcaagtgctgccagtactcgattccgagccgatctcacacttggtggaaggcttggaagccgtaggcgggagcgccaatgtgttcgtgcacaccagcgcaggcgcggtggccctcagcgtagtggaatacaagcccaacgaagaggagtagccgtcgcagcatgcacggtcaggcggcacgcctacggttgagggcgcgttgcacggtttcatgcgtggaaccggcaccctggccgcgcacgccgaagaacaccatcagcaccatcacgaagcagattgctgcactgatacgaagcgcccactgaatgccgaacacgttggcagccgcatacacggcttttgtgccaccaagcgcagtccaacgaagagacgtgaacgtctccatcaaaattaccaacaccggagcgccaatcgcgcccgcaatctgacgaaccgtattcgtcaccgcggatccggcgctcacctcttccggttccaaacaattcagtgaccatgtggtgatcggcatcaacacgaaacccatgccgatctggcgcacaaactgccaaatcgacacccaccaaatccacgaagtcatggaaatcaaactcatcatgaccgtgccgaaacacaaggtaatcgtgcctatcaacgccaccggacgtgcgccgaaacggtcaagcaccttaccaccgaaaaactgcgaaatgcactggcccaaagcacccggaagcatcaccaagccgctaatcgcagcagaatagccacggcaatcctgaatgtacaggggcatgatcaccataatcgaactgaacgcgaagaacgagagcgcggccgtgatcgtgccaacagtaaaactacgattcttcaacacgctcaaattcaacagtggcggctgcgcttcaggattttcaatctgcctgcgcgcgccatgaatctggcggagcacaaaccaaataattcccacaacgccaatcaccattggcagccaaaccataggatttacaaacgaatacgattcaatattcgtaaagccgaacattagcccgccgaaaccgaaaatagacagtccaacggaaaaaaagtcagccttcgcggttttatcgttctcaccgaaattatgcaatccaaaataggcaagaagcagcgaaatcacgccgataatggtcaacgtgaggaaaattgaacgccaaccgttcaagtccgtctgcacaccgccaagcgtcgggccgatcgccggagccacgctcatcgccatgccaaccgtacccattgcgaaaccacggcgagacagcggataaatcgaaaacaccgtgatctgcaacaccggccacatcacacccgtgccaaccgcctcaagcaaacgcccgatcagcaccatcaaaaaagttggaccaagccaagcgaacagtgaaccgatcgtgaacacaaccatggaaacaagcacgatttcgcgcgtcgaaaaacgtctcgtaaggtatgccgtaagcggcaccatcacgcccatgaccagctggaaaatcgacgtcagccactgaccggtcgtaacggaaataccaaaattactgacgatcgtcggcaacgcggcgctcaactgcaattgcgtgaaattaccgacgaacgtaataaatgtaagaatcgcaatggaaataaacgccgtgcgcgttaaatgaccgtcctgatacgattcctctcgagtaagcgctcgagacatgctccgcttcgctgacatcaatcaccttctccacattcaaacacacaaactatatgatagcccgtatgacagaggcatggatattcgcctgcggattcctgtttttgtcatttcggggtaacgctcccctatttagaggtatcatggcacacgaaagaggtaggcaagttttcgacgcaggcagcgtcgaggggggggggagaggataatgacagtcagggccatgttccacatctgcatggagttgtggggtattttcatatgtctgatttgcgcaggcggaattttcattgcaacaccacaaaaaaccagacgaactcgcatcaaaatactcatgcagatcgcctgcatgcttcttcttggaaccgacgcgctcagctggtattttcgcgtagatgcagacaaaaccgcatactatatggttcgcataagcaatttctcagtattctgcatcaactatattttcatgagtttcttcgcaacctatgtttggttgacagtgagcaaacatcagcatcgcaaacccgccgcattgcgtgctgtctacgcattatccgtaattggaattctcttacttatcatcacacaattcactggtcttttctactatttcgatgaccacaatctttaccatcgcggtaatttctatcttctttcgcaagcaattgcggtcttgggaatcgcattatgcctcttcatgttgatctcatatcgcaagaatcttgatcgcattattttcctttccatgatgtcgttcttcgtgctaccagtattggcgaccatctaccaagcactggcatacagtttttcattgcaatgtttggcgatcgtgatttccacacagattatgttcgtcatggacaccgtggaaatgaacatgcgattccactcgcaacaggccgcctacgaaaaagcaaggtacgaagccgaacatgacggcatgaccggtttgctgaacaaggaagcgggatggaagcacatgcgcaaatatttcgaccgcatggattcgcacgacgaagcgatgctgatgttcgtcgacatcgacgatttcaaaaccatcaacgacacatacggacacacggtcggcgatttctggatccgcgaggtcgcatcccagcttcggcacatctaccggcaagatgacattatctgccgatacggcggcgacgaattcttggcgcttattcgcaacaccgccagcgaacaggtgcttgaaaccacgctgggcatgttcttccaacagttggcacgcgcctcggaacagcacgggcaagacgtgcattgcagtgtgggcgtgtgccgtattgcagccgctgacggtgccagccttggcacggggagcgccgatggagacgcgatcggaagcgtggatttcggccaatgcgtcgcacaggccgacttggcgctgtacgaaaccaaacgattcaacaaaggaacgttcaccgtctacaactacgaccgttcccagccagcacccgcaaatatccgcgcctaaatgagcagcttcagctttccggcaattcctgcgctgggcaaccgtgcaatacggaaagcatcgcccgcttttcctgcgaagtgacagtcagcccgtacttgtctttcacgccaatctgccgggccacgtaatcgcaacggtattcactgttcgtcggcagccagtatgcggccgaagcggaacccttctgctgattcgcgggcccatccacggccagcagattgtacatgtcgttgccgaattggtacagcttcgcatgatcccacgtgttcgcgcccgactgccacgcattttccagcgcgaccacatgatcgatctgcaccgccgaagacgttttcactccacgtacgaattggatggtctgaccggtatacggatcgtcaagcgtgcccgacgcaacctggcagctacggccgttcttatattgcacgtccgtcagatcgcgcgcgagcacgtcttcgcgcacgtcgcaaccgttgccatcgtcgtcggtttcgcggaatccgaacgcatcgcgatcatatccggccttgctgggattgtcgtcgacggtaagtttttccaacgtttccgcagctgtgccggttgccgtgtactcgccggtgatttcgcctacggtcggattgactttcggcagcagcatgccgatagtgacgccgattaccgcaacgactaccagcaaaataagaatacgttccagcggaccgtcggcgttgatccaactttttttgaaccgtttgccggcccgctggatatcacgcacgtcgcgttcaatattccgataattataagaattacgattattctttcgaggcataattattaaaaataatacgaaattacggaattacggagtatcaggcgtacgtgaacgtcatcggatcatgtccggcgcgcgtcggaccgtcaagcgcgtcgatcgcggcatgttcttcaggggtgagcacgaatccaaacaaatcgagattctgcttctgccgatccgcatgcaccgacttggggatgatgatcgtgccattttcgatatgccaacgcagaatcacctgcgcaggggtaaccccatgctccgctgcgatgcgctcaatcgcaccatttccggcgttcaaatcagcaccgcgagccatcggcgaatatgcttccacggcaatgccgtgcgccttgcaatagtccacgacctcgcgctgctgccaggtcggatgcagctcaatctggttgacggcaggatattcgccggtctcctcatgcaagcggtcgagatgctcgggcaggaaattgcacacacccagcgtgcgcacgcgcccctccgcgcggaattcctggaacgccttccacgtttcgctggaacgccagtcgaacggggtgggccaatgcagcatgtacatgtcgacataatcgagctgcagcaagccaagctggcggtcgaacgccttgcgtgcgctgtcatacccctgctcggaatcgcgcagtttcgtcgtaacccacaggtttttgcgctgctcaccttccgtgaatcccgcattgttcagcgcgcgacccacgccggcctcattgttgtaccccgccgcgccgtcgatatgacggtagccggcttccagcgcactctccactacgggggtaacaccctcatcgtcgatgcgcagcacgcccaagccgatttgcggaatcagattgccgtcgttcaatgtgaccatgggggtatggaaagtttccatgcgttgtcctttcgaaggctgtgtttcaggcgattattctcaaccgttctcatgcttgttccagcttagccgcaggtcgccgcaattcggccatatttcgtggcacatgcctcgcattgcgtcttggaacggttcggacgcgccgttgcatgagtcgcgcatatgccgacagatgatatgcgcgtacgtaacataaccgcgcagtctcgtgcgctataacattgctcggataagagggcgacgaacatgaacagtacagacgacgcgaacgatatggacggcatgggaggcatggtcaatgcgggtgcgacggatggcgtggaatgctgggaaacggcacgggcgaatcacgatttctcttcccgccacgggcacgcgcttgccggcatgcttggacctgcttttgtggcggccgtcgcctacgtggatcccggcaatgtggctgcgaatatcacatccggcgcgaggtacggatatctgctggtgtgggtgctggtactcgccaattgtatgagcgtgctcattcaatatcagtccgcaaaacttggtatcgtcaccggaaaaagtcttcccgcaatcctgggagaacgacttggcgacggcggtcgattcatgtttttcatgcaagcggaagtcattgcaatatcgactgatcttgcggaagtaattggcggcgcaatcgcactgaaattattatttggacttccgctttttattggtgggtgcataatcggcattatttctacggtcttgcttatttttcaaaagagtgccacgcatcatatttttgaaaagctgattattgcattgctgctggtgattacttttggatttattgcaggcctttttattgatccaccaaatcctgcgcaagttttgcaaggtcttgttccgcatttcaaaggaaccgaaacggtattgatggcaacttccatgctgggcgccacggtgatgccgcacgcgatttacctgcattccacgctggtgaacgaccattacgtgccaggagagcccaaaccgagcgtaaagaccctgctacacggaagcaaaatagacgtgttctgggcattattacttgctggatcggtgaatcttgcactattgattcttgcggcgaattcattgcatggcatgaccggcacggatacgatcgagggtgcgcaacaggccattcagcatgtgctaggtccggtgatcggcacgattttctcggtcggactgctggcttccagcctgagttccacgtcggtcggcacatatgcgggcgcagaaatcatgcatggactgttgcggatcaaagcgccgatgtgggcatgccgcgtggtgacgctcgtaccggcgttggtggtgttgtggtttgctaagaatccgacggaagcgctgatcatagggcaagttgtgctgtcgatcggcattccatttgcgattattccgctgatgaaatacactcacgatcgatcattaatgggcgattatgtggatggtccggtgaaattcgcgatcaatatggtagttgtttcgctgattgtcgcacttaacgtgattcttgtaattctcacgctctccggtcgttcctgacgtgggtcccatttcggtgtccgcacagtcgaccggcgcagctgcgtccgcacagccgcctcgcgcagttgtccgccagtcgaccggcgcagctgcccgcgcaggaattgccggaacaccgaggttgattcgggtctgcacaacctcggttccgtgtctgcataagtctgattttgcgtctgcacaagtccggaattggcccctgaaatcggagttgcgcagacggaaaaacctgccaaaccggcaatacgggaatgaaaatcaagaacagataccccctaaaaaggcatttggcagggaaactgcacaaacatcgcgagctgcgtcgcgaagccaacgatacgaaatcaacagcacaaagggcgatagcgcgaaatcaacggcacgaaagccgacggcacgaaaccaacggcgagctacacgcgcgtggtggcacgggcgatcacgtgcgactgggtggtgatgtaactcggctccagcacacgcgtgccgtcgatccggtcgagaatgcggctgaccgcagtcggcgcaatccagtcgagacaagaatccatggtggtcagcggaggctggaaatatgcggcttcttcaatattgtcgaagccgatcacctgcatctgttcaggcacggaaatgccgttcgcagccaaagtgaacagcgcacccaacgcaagctggtcattgaacgccacaataccgtcgaatggaatcccggaatcaataagctgctgcgtaatgcgagcgccggaaccaatcgtccaatcctgcccagtgctcattaccagtcgggaatcgaatgccgctccccgcgcggcgcacgcttcgagcacgccgcgaagtcgcagttgcgcattgccttccactgcttcacgcacggaatcgatatgctccggttcggttcgcgatccgaccaccgcgagccgggttgcgccatggtcgaacaggtattcggctgcgagtcgggcttcctgaatatcgtcgggggtaacgtggtcggctttgccgtgtgtggaacgcgcgcccacgcatacgagcggatagtccacgtccaagtccgccgcttcaaggttttcgacttcggagatcgacaggatcatgccgtccgagacggtggtgttgaagttgcgcaggagtgattgcgctccttgtgcggatccttcggcgtaggtggtgacgtatacggagtagccgtagccgcgggccgcgtcgattacgcggttggcgagctccgacaggtatggggcggtcaatgttggtacggtgagtgtgatgaaaccggttttgccgcggttgagattgcgcgcggacacgttcacgcggtatccgagtcggtcgatgacttcctggactttttctcgcgtggagtcggtcatacggccggaatggttgatcacgttggatgcggttttgagtgaaacgcctgcctcttcggccacgtctcgtagggtgacgcgttttttgtccggcttcggctccggctttgactcgcccatgttcgtctccgtgattgttgaatatgccggtaaaaagtttaccagttatggcaagcccgccattcttgagtttcagaatggcgggctcaggttgtgtgagattgttgtgttacgcaatcaattgcgcgaaattgcgcgaaattatgcggaattatgcgcgctttacgacgagtacgccgttgcgatgcacggtgtagctgcccgtctgttcctctgcttccgcttggaacaggtagattggttcgccttcgatgccctgcaatgcgatttctttcttgccgcgcggcagatagaaatcgaaggttgcgtcggcggacttgcgcacggtgtgcagtacgtcggaatcggtcggattggcgacatttgcggaatcttccacgatattctcgcgcacgaattccgtaagatcggcgacgttgagatcgcagccgacgaagtatgtttcgccggaaccgtacggattgcgggtgattgcggcggtgccgccgagttcccattcgtcggcttcttcaccttcgtaggtggctaatacctgcgcgcgttcgccgtcgacgttcacatcgttctgccacaggcgggtgaccgcaccggagctcaaacgaatttcggacggttcgccttcggcttccgcgccgagaatgttgaattcctcgccgcgaatacccagcatttcgcgcagcaggccgtctccggctcccgggtatccgccgagccaggtgtggaagttttcgtcgatcagtccggttgcgtaaccgatgaccacacgaccgccggcagctgcgaaatcggccaaacgctgcgtatcttcggcgctgagcatgatcacggtcggcagtacgacggtcttgtatgcgctccaatcgtatttcaacggcacaatgtcggcacgggtgccggcgttgaggaacgcacggtaccagtcgcgcacgtcatgccaatggttgagcttcatgctcggcagggtttcggagcgtgtggcccattcggattccgcgctgaacaggatcgccgtatcggactgttccagttcggtaccctgcacgccagcgtcgccgagggttttcagcgctgcgcccagttcgcacacttggcggaacagtttggtgtcttcgcccgcgtggggcacgagtgcggagtggaaggattcggctccgaatgcggaggcacgccactggaagaagttgatggcgtcggcacccatggccacatgcgcaatggagtcacgcacggtttcacccttgcgcttgcgtgcgttgagcggcttccactgcacggccgaagtggaatgttccatcacataccacggcttgccgagcgcgagggaatccatcaaagcgtcggagcagaacagttcgtcgatatgcgattcgccctcatggaagtaatggtcgttcgacacgaaatcgacttcctcggcccagtcggcgtagtccatgcagcactggtcggtagagaccatgaagttcgtggtgaacggcttgtcggggcagatttcggcgatggcgtcgcgttcggccttatagaagtcgagcagcatatcgttgccgaaacgctcgaaatcaagcttttgaccggggttcaccatggagtcggcgcccatgaaacgcgggatgagcacttcgtggaaaccgttcatttcctgaccccagaaggtggtgccccacgccttgttgaggttttcgatggtaccgtatttgcgttcgcaccacagacggaaggcattgagcgcgttgtcggagtaatcgtaacggttgttccagccgtattcgttgcccatatgccatgcggtgacgtacgggttggtgccgtagcgttcggccagtttgcggcacagggtgagcgcgtattccttgaacaccgggcttgtcgggctccaggattggcgcgatcccgcgttgacgggatggccgaatttgtcttgcggcagcacttccgggtgcttttcgtacagccacagcggcgcggtggcggttgcggaggccagatcgaccgcgatgccggctttgccgagcttgtcgatgatgcggtcaagccagccgaaatcccaacggttttcttccggctgaatgcgatcccagctgaaaatggccacggccacggtattgacaccggcctgtttcatgaggcggacgtcttcgtcccacacgtcttccgaccactggtcgggattgtaatcaccgccgtatgcgatgcctttgccgttgtcggtcagcagttccggccatttgaacgtgcgatgcatggattactcctttgtgtgcgtatggcatccgctataacgccgaggatgccagctcgacagcttcccttcgaaagctctcgtaaaatctttttataaaatctagtatatatatttactaagatatttgagatggtcccggggatgtccacgatgacacccccgaggtcttattttttgttcttttcggacgattgccgaaaaatcggtatgcgctttaccgaaatttcagcatgcgaccgttgcgatcattccttgacggcgcctgcggcaaggccggactgccagtacttctgcaggcacaggaacgcgatgaccaacgggacgatcgtgatcaacgaacccgtgaccaccaggttctggatcgcctggccgccagcggtgctcgcctggtccttccactggttcagaccgatcgtgagcggataccagttcgaatccttcagcatgatcaacggcaggaagtagttgttccacgtcgccacgatcgtgaacagggccgtcgtcacgatccccggggcgagcagcggcagggatacctggaagaacgtgcggaactcgccggcgccgtccacgcgggcggcttcgagcagctcggtcggcacggcctggtcggagaagatccacatcaggtacaggccgaacgtcgacaccaggctcgggatgatcatggcccacggggtgttcgtcaggttcagcttggcgaacagcaggaactgcggcacggccagggcgatgcccggcaccgagatggcgccgatgatcaccgcgaacacggccttgcgtcccgggaaacggaacttcgccaggccgtacccgcccatgatggcgagcagggtcgcgccgccggcgcccacgaccacgtacaggatcgtgttcaggaaccagcgtccgaagatgccgtcctggtaggtgaacacggtcttgatgttgtcccacaaagcgaacgtgcggccgaagcccagaccgaacgtggacgtgaagtccgcctgcgtcttcgtggcgttgatcagcaggtacacgaacgggaacaggcagtacaccgcgaacagcgcgcacacgatggtcagcagcgtgctcctgcgcgggttcgccacgttcgcgaagccggacttcgcagccctcttgcgctcggccttctcgtcgcgcgcgaccctcttgaggcgttccttctcggtctttttcgcggccttctcctgggctttgagctcctgagcggtgagcctctgctccgtgcccgcggcgattgttgcgtcactcattttcgatgctccttagcgtttcttcccctatatgcggatggttcgcgccaccgggcgttacttcatctgctccttcatgctgttgagctgcaccgcgtacgcgatcgccatcgtgatcacggccatcgtgatcgccagggcggcggcgtagttcgactggttgcccgcgaagctcaggttgtacgcgtacatgttcggcgtgtagtacgtggtgatcgagttgcccggcaccatgttctgcaggatgctcggctcgttgaacagctggaacgagccgatgatcgagaagatcaccgtgatcgcgagcgagcccttcagttccggcagcttgatggacttgacgatctgccactcggacgccccgtcgatcgaggcggcctcgtacagcgaatgcgggatcgtggacagcgagctgtagaagatcagcatgttgtagcccgtgaactcccacgtcacgatgttgccgatcgaagcgagcagcacgttcgggctcagcacgtcgaggttcgtgcccagccagtcgttcagggagccgaccagaccgtatttcgcgccgtacatgaagccccacaccaaggtcgacaccacggccggcaccgcgtacggcaggaacgtggtgatgcggaagaacttcgcgccgtgcagcttcatggaatccaacgccagggccatcgccgccgacaggaacagcatgaccggcacctgcacgcaggtgaacagcgcgaccctgcccaccgagctccagaactgctggtcgtggaacaggcgaatgtagttgctgattcccacgaacttcgtgccgccgatcatctgcttctggaagaagctgatgtagatcgcgtacaggatcgggatcacgaacacgaacacgaacaccaacgcgaacggccacatgaacttccaaccacgccaatccgcacggtgacggttgacgcgaacctggtccgcaggcgtatgcagcgcatccgccgcgactgctgcttgctgagacatgctttcttctttctgtatgctttttgctctattgatcgcacaaccatgtgcaattgttaatccgcaaaatcttttattgtttgaattacaggattgctatttttttgaaatctttttctattgtaagatttcgtttttaaaattatttttacgaagtgaggcaggcgggtcacgtcagacgattcccacctgccgtcgatcttcatggttgcgatggtgcgttgcgtatgtcggatcgcattatcgcgtttttcgttgtgccgcacggcagcggctgggcgccgtcagtccttgctggtgacggtgtagccctgctggttgccgtgatcggtgagcgccttgctgtagttgacgaaggcttcctccagagtgatgtcctcgctgtaggccttggagatctgatcgccgaaggtggactgcgcgtacgggttgtacggcaggtactggaaggcggagaccttgcgctgggcggcttcggagagaatctcgttcacgttctggccgccgaagtagtcgttgaccttcttgttggcttcagtgttcggatcggtgaaggagtcggaggagaggatcttcttcaggctcgggaaggtgccggtgtcggccatggtctgggcgccgtcgccgtgggtcaagtattcgacgaacttgtaggccgcggcctgctgcttggactgggagacgaccgcgagtgcggagccaccgtcttcagcggagacctcgtcaccttcgttccactgcgggagctgggccacgcgccagttgccggcctggtcaggagcgccgttcatgaggttaaccggcatccatgcgccgatggtgagagtggcgatgtcgccttcgttgagcgcacggttccagtcgtcggaccagttggcgatcttggtgtcgacgaggtcttcgtcgatgagcttctgctggaattcgatgtacttcttcatgccggaatccttggtcatgtcaatggtgatgttctcgccatcaaccttccacggctgcgcaccggcctgccatgcctgggcggtgaagggctggtattccatggaggagccggaattgttggtcatgtaggcgccgatggccttgaccttcttggctgcctcgtaataatcgtcccaagtcttgatctgggagccgtcgacgccggccttcttgagcacggcatcgttgtagaagaagacttccgggccggaatcaatcggcagcgcatacggcttgccatcatactgtagcttgctccacgggcctgcggagaagtcgtcttcgagcttgtcggcaccgtaggcggtgaggtcaacgaggtcgccggtaaccgcgaactgggtgacggtcgggtcttccagcatgaccacgtcgggggcacccttgcctgccgcgacggcgttgctcagtgcggtctgggtgtcggatgcggtgccggtgttgttgaatttgacggtgattccgggattggccttttcgaagtcggcgatcagggccttcatggtgttgccggtgtcccagccccagaaaacgagatccgccttgtctgcgtctccggcgttggccttggcgtcgttgccgccgtcgctgccaccgcaggccgcgaggctggcgagggttgccactgctgctaccgctgcgagagccttcttcatgttgcgcatgttcttttccctttctgccatccgcttcgcatgctgattgcatgtcggtcgcatatgtttcggaacatccgccgcggaatgcacatgccgtgctttccacttggtgatgtttgtatgttcgcgacctgccaaacaatacccccgtagtgatgtttggactggtaggatggctttgtttcctttctgatacaaccgtgtaccattagctccgatgatacacggttgtatcaaggtgtcaagtaaaccggttcgatagcccccctgcaactgttgtgcgctattgaagcgccaacgaaatcatcggcgtttcgcacaaacagaatgacatcgtttgcacaataatctgcgattgtccgcgcatctcaaccaaaaaatggatcgcaagaaagctacctcacaagagaaaacatataaagaacatataaaaaggaggtctgcgaatcgcaaacctcccaaaacaacgcatacgacgaagagacggactccgcaccgctcgatgagcctacaaactgaggaacagctcgtgaatgcgggtatcgtcggtcagttcggggtggaacgccgtagcgagaatcttgccctgacgcaaaccgaccacattgccgtcgaccgacgtttcgaccgtggcccgctcgccgacctcggcaacgaacggtccgcgaatgaacaccagagggaaatccttgagcaccaccgacgtatccgaagcctcggaagtcccctcctcaccagcagccgcggaaatcgcagaagagacagactcccccgacgcaaccaccacagcatccgcatcgtcggaagcgccgaaatcggcggacgcagcgaacgaaccaagctgacgtccatacgcattgcggcgcacgaccgcatccaacgcgccaaaatagacgttctcgtcgttatcgagacgacgagcgagcaaaatcatgcccgcgcaggtgccgaataccggctttccagcggcgatatgcgcggcgatcggatcgaacaagccggtcgaacgcagcaatttgccctgcgtggtgctttcgccgccaggcagaatcacgcggtcgatcgaatcgtcgaaatcctcggcggcacgcagcagtttccacggcgcaccaagccgatccagcatcgccgcatgctcggcgaacgcgccttgcaccgcaaggatgccggtcacgccatgctgcgcggaagccgcaccttcggcaacgtcagtcgattcttccttcgaaatgtattcaacggcaacaaccatcggatctccttacccaaaccatcgcgaatcatgcgaaacgggctgcgcgcggcgcatcgaacagacatgccgacagccgcgcacagcgcacagcgcacgaaatgacagcgcaatcactcgccgcgagcggccatgatggtttcgatctcgtcttcgttgatgccgaccatggcctcgccgaggttctcggaaaggcgtgcgagcaggtcggcgtcctgccaattggcggtggcctgcacgatggcggcggcacgcttggccgggtctccggacttgaagatgccggaaccgacgaacacaccttcggcgcccagttccatcatgagcgcggcatcggccggagtggccacgccaccggcggcgaagttgacgaccggcagacgaccgttgtcgtgcacatacttggcgagatcgtacggcacggccagctgcttggcggcctcatacacctcgtcgtcgcgaagggagacgagctcgcggatctgcttgttcatggtgcgcatgtggcgcacggcctggatcacgtcgccggtgcccggctcgcccttggtgcggatcatggaagcgccctcggcgatacggcgcagcgcctcgcccaggttcttcgcgccgcacacgaacggcacgtcgaactggttcttgtcgatgtggtacacgtcgtcggcgggactcagcacttcggattcgtcgatgtagtcgatttcgatggcctgcagaatgcgggcttcggcaacatggccgatacgaacctttgccatgaccggaatggacacggcttcctgaatgcccttgatcatggccggatcgctcatgcgggaaacgccgccggcagcacgaatatcggccggaatacgctcgagagccatcaccgcgcatgcgcccgcgtcctgtgcgatcttcgcctgctccggggtggtgacgtccatgatcacgccacccttgagcatctgcgccagattcttgttcagttcgttcctgttgttggccatcgccagcctttcgtcgaatcgtattccaccctgctgcagagcggatatctcttgacacagatactaacgatttttcgttacaaaatcatgtgaactgaatatttgcacgtcttaaaaagttgcttttcttaaattctgactatcattttcatgattgtttcattttcttacgatttcgattctgccgacgattccgcaatttcattcgcttttcttgcctgatatgcgccattcgctttcgattcgcgcgcacggctcctttcgaccgcactttcgatgcacgctataagaaatacgaatgacgcatgattttcatacgaccacattgcggacgggggtgcagatggattcgcgtattgcgcactacatacgcagtatgcgatcagcgatgcgcatggtggaatcgcggtgcgacaccagcacgacggcgctcccccgctcggcaagatcattgatcgacccgagaatcaccgactcgttataggcgtcaagacggctcgtcggctcgtcgaacagcaccaaatcggcgtcgcgaaggaacatgcgggccaatccgatgcgttgcttctcaccctccgaaaggcggccacccagctcgccgacccgcgtatccaagccgttcggcagcgcatcgaccagttcgagcgcggacgccttggcgagggcttcgcgcaatacggaatcgggaatgtcgtgcgcgagatccgaatcggaggaatcagcggaattaccaccagcattactgctggaattactacagaaattactgccagaattactgtcagaatccgaaaaatcggcgtcattgcaggcaatagcgagattttcgcgaatcgttccgtcgaacagatacgtctcctgtcccatcatcgtctgcacgcgccgacgccatccggcgtcaacctgcggcaatggaacatccgacagcgaaatcgtgccggaatccggatcccagtagcgcatcagcagtttcaacatcgttgattttccacgcccggacgggccttgaataccgagaatgccctgccgtgaaacatcgagtgaaacatggtcgagcaccggttgcgaggcgatgccggcaccttgttcgccggagggttgcgcttccgcggggcgtgccggactcatgccagtcgcatgctccgaccgcccgtttggcgtgcgttcgccggaaatacggacgccggatccatagccgaatgtgacatcgcgcattgtcatgccctgatattccgggcgttcgctcccctgctcgaccacagcgggagcctcatccatcaacgcgaacaggcggcgtgccgaagcaaacgtttgcgtcagattcgccggcaacgcactcaacgcaagcgtcggcccaaacgagctggcgagcagcacgaaagccgcaaccaacgctggggcgttcgatcccacggaacccatccacatcaggccttccgacatatcggcggcagtggaaaccgcagtgcacaacgtcatcgcaaggaaagccgcaatcgccgtgaacagcatcaccaataccgcgccaaatcctgcaaaatcgccatttttcacgctcagacgcacacgtttgacccacagcgagcgcgtgcaacgctgaatggacgcaagccgggcatcgctttggccgaagcggatgatttcgccgatgccacgcatgtcgtcaagcatttcgtcatcgagggcggacgactccttgcgcagttccggaccgatgccgcgcaccgcggatgcaaagagtttcggcagtatgacgccgactgtgaggtgcgcgatgaccagcgtcaccgcgaagggtgcactcagggtgagcaatgcgagtgtgtagacgacggtggtcacaacagcgatgacgatcgggctgatggtgtgtgcgaagaagatttccagcagttccacgtcggtggtgaccagtgcgatcaggtcgcctttgcctttgcctgcaagcttggcgggggcgagacggcgcagggccgcgaaggctttcgcacggaatagcgcaagcagacggaacgccacgttatggttcatgaactgttcggcgtaacgcatgccgccgcggatcaacgcgcatacggccatggctgcgagcgccgcgggaacgctgaggttccagaccggcgagccgactgcagcgaaggccgccgcgatgccgaacaccggcaggaaagtggcggcgagatggccgagcgtgccgcagacgcacgcgacgatcatgtacttgcgctgcggcccaacctctttgagcaaacgcgcaatcacccgcaccgtcggcattgccttcgcgtccgattctgccgaatcggacatccgaacgcccgttttcgcaccctgtgcgtccgtttctgcagaatcggacacttggagacccatttccgcacgctgcgtgactgattctgcagaatcggacgctttaagtgcgtgggatgcagaggtggaatgggttgcgttattgcgtagacctatgttttccacggtttgttgggcgtggaatagtttggcgtatgttccgttggcacgcatgagttccgcatgcgtgccttgttccgccacgcgcccgtgttcgaataccaccacatggtcggcgtcggctgcattcgccatgcggtgcgtcaccatgatcacggttttgccccgatccgcaagcgcccgaatggtttgcagaatcagggtttcgctttccacatcgacgctgctggtggcttcgtcgaaaatgtagacggcaggctcccgcagcaatgcgcgcgcaatggcgatgcgctgtttttggccgccagacaggttacttgcgccctgttcgatggccaggtcaagttcttgcgattgcgcacgcacgaaatcgctgatatgcgccgcttccagcgcttgccacagttcactttcgggggcatccggcttggccatcagcagattgtcacgcaacgttcctgcaaaaaggtggctttgcgccgccactatggcgatttccctcgtaagggattcgatggaaagatcgttgatttggtaccgttgcgtcgagttgtttcctgtgtttccggattgcagccacatacatccttcatatccggaaagatttccggagagcagttcgacggcggtggatttgccggatccggacggaccgacgatggcggtcacctgcccgcgccgcgcagtgaaagagacgccatgcaatgcgacgaccgaaccatcatcatctttcgacatgcctgtttttccagcaccaaccacaccggactttcccccgatttgtccagtttttccagtttccatatccgccgtcacagccgtatccgcagccacactcacagccgccgcagcgtccgtattcacgtccacatatcggaacgacacgtcatcaaagcacacgtccacaccgttatcggaagcgccgaattccggcatttcctgcatcccatgcgcaggaatcggcgtatcaagcaatgcgaaaatacgcttggtcgaagtcatgccgttcatcgcaacatggaagaacgaccccaattggcgcagcggaatgaagaaatccgcggaaagaagcactatcagcagcacgccggcaagcggcaatgcggcaccactcgcatactgccagatcgatacgcccacgccggccgcggctcccccgtatgcgacgacgtccatggcggtgagcgagcgcagctgaatttgcagaacattcatggtcattacgcggaattgttccgcttgctcgcccattttcttggcggcatgcgcatccgcgtcaaaagttttcagcgtttcaagaccttgtacattgtcaagaaacacagatcccatgtcggtgtattttccccaatattttttgaatactcgggctgcgcgcattgcgaccatgccaacaatcaatacaatcaaaggcgcgcatacaagcaatgtaacagccgtcggcatattaatcggcgcaactataaaaaataatgttaccggtgcaagaatcgcataaaacagttgcggtaggaataattcgaagaagctttggatttgttcgatgccttcaccggcagattgcaccacgtcggcagtgctgatatgttgcgaatatgatggtccgatcgcaagcattttattaaaaagctgttcacgtaacgcgagtttgacacgctcagccgcttccgcgccgaaataggccgctgcgcgcatcatcagaaaacgcagtaccgcacagaccacgatcgccagcacgcatccgacgtatgtttccgcactgaatccgccgtagccaaagccgatgaacaggcgggaaatcaggccactatcacccatggagaacatggggtcgaacgccgattccaccacggcaagcgccggcgaaagcatgaccaccaccgtcaccacgaacacgacgttggccagcagtccgacccattggcagagcactttcgccgcaaccaaccgccccacgccgggagcgagggaaaacagcctcttgtcaaacataaacaccttccgtccaatgagcgcactcgcgttgccagctcgcctacggcccaaagcgcaatcgccatgcatccaacaaacgaatcgcaacaggccaatacgggaaaaccggtgcgtggcaaaccgttttcagcctatccaaggcagctcgcaatcgtcaagggcgcattgcatacagcgaaccgtcgcaatcgaattgccataatcgacctcaaatcagcaacgttgaaaagagaaaggctggatgttcgccgttgagcaggcagccctctgacgcaaggggtaaattgcgtcactcgtgagtgtactcgataaaaaacgctcgcaccaccatttcttcgcatttcgctggttttacggtcctttcggggatatatgggaagcatggcggttcccccgcaaccgttacgtcaagccttttttcgaacggatacagcgcgacaccaaacacttgatttttgacggaatagcaccatttgtcagttcatacaaagttgatgaaatatttcttgtcgcttctcacaatgcagacttacggccccgtaacttagaatgtgcaaggtgcgcaaggggtaggaaacgcggacacacggtttgtatcgctcccgcacgcatcacaagcagaaatacgcggaaacaacgcaaaaaccgcgagaaagagaacgcttcatgctcaccgagtacaccaccccgggcgaatccgttgaggtgcgcgacgacgaatccatctattccctgcttactggacgcatagcgcgcactggcgaagataccgtgatcgcggaacgcaaaaccgcccccggccaatggacgaaggtcactaccggcgaattccacaatgccgtgctcgccgccgcaaaaggcctcatctcattcggcatcaacaagggcgatgccgtcaccatcttctccaccacccgctacgagtggggtgtgctcgacttcgcactggccgccatcggcgcggtgaacgtgccgatctacgacactgattccgcggcgcaggccgagcgtatcctcaacgattcggatgtgaaactggccatcgccgacaatcgcgagcgcttcgaccgtctcgactccgtaatcgaccgctgcccgtctctcaagcacattctgatgctcgattccaacgccatgggcgcgttggaaggcttgggcgtcaccgtgtccgacgaggagctggaagcgcgcatcgattcggtgcatgcagacgatctggccaccatcgtgtacacgtccggttcgacgggagctccaaagggtgccgagctttcgcaccgcaatttcatatcgatcacgcgcgcaggcagtctggcgttgcatgagatcgttctcgaagatcatccgcgactgcttctcttcctgccgctcgcccactgtttcgcacggttcatccagtacgcgtcgattgcttccgacgacggcgtggttggttatctgccggacacaaagacgctgctgcccgatttgcgttccttcgaaccgacatatctgctgggcgtaccacgagtgttcgagaaggtgtataacgcggcctcccgcaaggccggcacgggttggaagggacgcctgttcctcaaggctgccgaagccgcacgcgattggtcgcgcatgcagcaggccggcgaacgcccgaccgccaagcagatcgcgcagcatctttcgtatgaggcttccgtataccgtaccgtgcgtagcgctctcggcccgcgcatccgctacgtggcatgcggtggtgctcctctggacgtgtctctggcgcatttcttcaacggtatcggcctgccgatgattcagggttacggtatgacggaaaccgctgcgccgttcgccgcgacccgcgtcaccgacaatgtgatcggcactgtcggccaaccggctccgggatcgtctgtgcgcatttccgatgatggcgaacttcaggtgaagggcccgaacgtgttcaggggctaccacaacctgcctgagaagacggcggaagcgttcaccgaggatgggtggctgaaaacgggtgatttggcgtcgattgacgacgggggacgtattacgatcaccggccgtaagaaggacatcatcatcaccgccggcggcaagaacgtttctccgattccgatggagcaggagattgtgaaatgtccgattgtggagcatgtggtagttgtcggcgacaatcgtccgttcatcggtgcgctgatcacgttggatccggaaggattggaggcttggctgccttccattggactgtctgccgatacgccgttggatcgcgtggctgcgaccgccgccgttcacgacgaaatccagaagtacgtcgacaaggcgaacgcgaccgtttcccgcgccgaatccgtacgtaagttcgtagtgctggatacccagttcacgcaggaaaacaagtgcctgaccccgtcgctgaaggtggtgcgtccggcagtgaaccgcgtgttcgcacaggtgatcgatcagcagctgtactccggcaagcgctgaatcgcataatacataaaagcgtggggtacgagagaacgtttgtattctctcgtaccccacgcttttgttctgtctgtacaactttcaaggaatgcaaacgagcgccggtgatcggaagcgatccgacccgccggcgctcatatggcagagattagtgatgaatccagaatggctaacgacactccatcagccattgtcagtaaagcgacaatcagtgacggttccgtcagtgcataacgcgtgcggtaacggtgcgacagaaggcgaaggcgtacgagggtacgtcgagtcttctgccgtgccgttaacgctccgttatgtcagtgacggttgttgaggcggtggtacatttcggagatctcaaggtcgcgctcgaattctgcggccttggtgttcgcgtcgatggtggcgagttcgacaccggcgatgcgggcgaagtcttcccaagcctcgcgaccgacggaggtggtcatgcaggtgtggtgggaggcgccggaacgcagccagcactcggcggaggtcttgaggtccggctgcggcttccacaggccacgggcgcacggcaactgcttgagctctccgagcggctcgaccacgtcgaccaggttcatggtcaggcggaaacgttcgcgcacgtcagacatggacacgacgacggcgtccttcttcggggcgacagtgaagaccagacgcaccggatcggccttgccaccgatgccgagcgggtggatttccagcttcggcttggcgatggtgccgacggacggggagacttcgagcatgtgggagcccatgatcatctcgttgcccggggtgaagttgtaggagtagtcttccatgagggaagcgccaccttcgaggccgtagcccatcactgcgccgatgcgcacgagcactgcggtcttccagtcgccttcggcggagaagccgaagccgtactcggacgggaagcgctgcgggccaacgcccggcagctgcgggagagcacccaagtcttcgaagttgtcaacgccggcggtgcagccattggcgcgcatcatgttgaccatggcggcttcttccttggccgcgatgaacagggaatcgtacttggcgtcgagcagagccggatcaacgtcgtacttaaccttgtagtcttcgatgatgctcttgacctgatcgtccttgacggcttcgtaggctgcgacgagctcgttgacggcccaagtgttgatggatgcgccgaacacgcgctcggcttcggtcttgtcgccttcggtgacggccacgttgcgcatgttgtcgccccaacgcatgaccttcatgttgttggaagcatcccagccggcgcaggcgcgtgcccaggtgccgatttcttcggcaacggccggatcggtgtagtggccgaccacgatcttgcggttgatgcccagacgggtcaggatgtaaccgaactcacggtcgccgtgtgcggcctggttcaggttcatgaagtccatgtcgatggtttcccacgggatttcgaagtggtgctgcgtgttgagctgcagcagcggcttggtgagcacttcgaggccgcggatccacatcttggccggggagaaggtgtggcaccaggtgatcacgccgatgacgttcgggttggcggaggcttcgaccatgaaggccttgacgccgtcggaggacttcagggtcggcttaagcaccaccttgaccggaatcttgccggttgcgttgagcgcgtcgacgatttcgccggactgctcggccacctgacgcagcgcttcttcgccgtacagatcctgggatccgacgccgaaccagacttccttgccttcaaacgggttttccattgccatgtgattgttcctttacttcgttgtttatggagtttttaattatttattgcgattgcgaactcgcgcttcgcgttgttctgttgcgtagcgcgagttcgtacgattgtgaaattatgtaggattacggaatcgtaggattgcagctcagtgctggccgtagacgttggtgtaacgatcgttcagcttcgcgatatcctcatccgaaatcggaatgatctcacccaactgcctcgccgcccacatcgtatgagcgacctcctccgtcatcgccgcggccttcaccgccgattccgcgtccttgccgatggtgaacggaccatggttctgcatcagcaccgcaggagacttcggatactccctgagcgtctcgaccacgccctcgccgatcgcctcggaaccgatcagacggaacggacccaccggaacaggaccaccgaactcgtcgcccatcatcgtcagaccgcacggaatgttctgccccgtcgccgcccacgccgtcgcatacgtcgaatgcgtatgcaccacgccgtacacgtccggcatatgacggtagatgtacgcatgcgacgccgtatcggaggaaggagcctccgaaccgtccaccacgttgccgtccagatcgcacaccaccatgctcgacggcgtcaggtactcgtaacgcaggcccgacggcttgatcaccatcagatccgccgtatgcagacgctgcgacacgttgccagccgtccacaccactaggttccacttgatcagctgctcgtgcaaggtcgccacgacctcgcgcacctgcttgacctcggcacgaacctcaggaccataatcagccaaagtagccataatcatttcctttcaaattgaaataagtttttaaaatatttatttacttggtttccagcggaatgctttcgattgcaacatgctcaatcggcagtcccttgcggaagcgatcgaagaattcctcgaatcctgcgacatcgccttcatccggattttccgtggtcgaagcggcatcggcgaacacacgagcgtcaaggaattcgtcgagcggctggtcggcgtgccacaggtagtcggcaagcacggccatgccccatgcgccgccttcggctgcggtggacatcaccttgatcggcgtatcgaatgcggctgcgagaatcttctgggcaaccttcggggtggtgaagatgccaccgtggccgacgagggagtcaacggcaacgccttcgtccttggtcatcacatccatgccgatcttcaccggggagaatgcgctgaacagctgggcgcgcatgaagttgccgaggctcatgcgggcttccggaccgcgcgcgaacagcgggcggccttcgggcagtcctgcgaggaattcgccggagcggaacgggtagttgatgagtccgccgcagttggagtcaacatcgtccgcgatggcggcgcggaacagcgtgccatacagggtgccggcgtcgaccggagtgccgattgcagctgcgaactgtccgaacagaccaacccatgcgttgaggtcggaggtgaagttgttggcgtggctcatgcctgcgagatcgcctgccggagtggtgacgaggtccacttccgggtgcaggcgttccagcttgcgttcgagtacaaccatggcgaagatggaggtgccggcggaaacgttgccggtgcgcacgcgtacggagttggtggccaccataccggtgccagcatcgccctccggcggagcgaatgtgattcccggctgcagcgtgcctgtcggatcgagcagcttggcgccctcttcggtcagcgtgcccgcaggagtgcctgcaaccagcggttccggcagcaggtcggcaagcttccacggctgggctgcgacttccggaatcgcattgaacttctcaatgaattcggtttcgtaggtgtgcgtggtagggtcgatcgggaacatgccggatgcgtcgccaacgccgagcaccttcttgccggtgagcttccagtgcacgtagccggcgagggtggtgaagaaatcgaccttgccgatgtgctcttcgttgttgagcacggcctggtacaggtgtgcgatggaccagcgttccggaatgttgtactggaacagttcggaaagcttctcgtgtgcttcggaagtgttggtgttctgccaggtgcggaacggcaccagcagttcgccatctttgccgaaggcgaggtagccgtgcatcatggcggagaagccgatgcgtcccacgcgggtgagcttttcgccgtaagcgttttcgacatcttcggcgagcgccgcgtatgcggtctgcagcccggtccagatttcttcctgcgaatagctccacaggccgtcttccaagtggctggcccagccgtagtcgccggctgcgatggtggtgtacgtgtcgtcgatgagcacggccttgattcgggtggagccgaattcgatgcccagactcgtcttgccagcgcggattttctcggcggtcagcgcgatgcgatcgtcaagtccctgctcttgcgccatagtttcaaactccttgcatccgagcgcctcacaaccacattgtcgacggaatgttagcgctcactgttaacgctcactattctaaacagaaagtggcgactatacaagttcgacgtgtcacgcaatcgtcaacgtactaccggcagatcgtcagccgattttcttgatataccggcattgcgaaatccggcaatcgcagcacatgcggcaaaaagagatacgagaatcacaagaaatacaaaaatcgcaggaaatattcagcgacggctggcggtgcccaaagaagtgcggccgatcaccttcgcgggaatcaggccgacgccatgctgcgacgaggcgaacgaattctcatcgccctcccccagcaaaaacagcgtctcacgcatggcggcaacgccaagctgttcaaaatccggtcgaaccgtggccagcggcgggtacatgttgtccatggcgggcatgtcgtcgaaaccgaccaagctcacatcctgcggaatacgcatgccatgttcatgcagcgcacgagacacaccaaccgcctggctgtcgttcgcacacaccatgcacgtcggcagatttccgccggtacgaccgatgttttcgagaatatggttcatcttgccatacgcttcggtcgattcccaggtttcgcattgcacggtgacggaactcaccgcattggccgcgcacagcttattccacgccatcaaacgcgtggcggcgtcacgccattccttcggacctgcgaaataaagcacggaacgatgcccatgctcgaccaccaaatgcatcacgtcggccatggccgaccattggtccactcccactacggatactcggcgacggtcggccggtttcatcaagcgcaaaccatcctgcacgctgatgctgccgtgcgtggaggtgacgatgacgcgcggctgcgtgatctgcgcacggcaggcggcggaaaacataacatccgtcggcgtgaggaaaatgaacgcgtccacgttcatctcatcgaacgttgagcacaattcgtcgaattccgtctgcgagcagagcgcctcgtgcaccatgctcaccgacatgaacagtccatgctgcctcgccatcgcctcaatcgaggaaatcgcggaaatcggaccataaaagcgttgcccgcccgcaaccaagccgatggtgcgggagcgatgcgaagcgagggcacgcgcggaattgctgggacggtatccaagcgcgtcgatggctttctgtactttttcgcgggtggcatcagacacgtcgggggaatgattgatgacgcgcgacaccgtttgatggctgacaccagccattttcgccacttcgaacatcgaggggcgtttgtttgccgcattgcgcttgcctgccatgctccgtcgccttccgcacactaccgttgttactttcgactattctacacgcaacttcggttagcgctaacagacgctatttttcagccatttgagcgagtcgcgcagcgaaattcggccagtcggtacgcatggcggtcaacagtttacgattggggacttcctcaatcggcacccattcgatttccatgctttcgtcgtcgttggccttcggctccacgcggtgccccggcttttcgaaagcgaacacggtggtgtaggcccacggtccgtggtcttcgcagtatgatccgaccacgtcgatatcttccggcgtgatgttggcttcctcgtacgattcgcgcagcgcgccctcgatcgggctttcaccgtcggcggtggcacctcctggaatgccccatgtgccaccttccgcgctccacaccgcgcgatgttgcatgacaacgtgcgtcacttcgccggtctgttcgcttcggcgggccaagagcacgccggacgcgccgttcgtgccccaatgcttgcggccgcaatcgcaatcaatccaaccatcacccggctgatgcacgttttccttgggaggaagcggcttcgcggcaccggttcgcgaatcgtgttcgacgttcggttcttgatcggctcgcgtcacattccacagatcggtccattccacgccgagctcggcggccaaacggcgcgccagcggaaggctcaggccgataatgccgtgcggatcgccttcgatggagtcgatgaatgctccgccgaagccctcaagcgtgaaggaaccagccacttccaacggttctccggtggcgatgtaccgttcgatatcggtgtcggaatattcgcagaagtgcagcgttgccctgctcgcgcctcgcgcgatacgcccggtggcgaagtcgatcaggcaatggcccgtccacaattcaccggtggcgccacgcatggcacgcagtcgttcccgagccacctcagcgctatgcggcttgccgtaacattcgccgtcaagcaggaacatggaatcgcagccaagaatcagcggaccgactttcgcacgggtcaggctcggcttgccatcaacgaaatcagcaatcgattcggtgatcgtaggaatggtgactcccgaaaaatcgcgggtcttcacatcggaggcggactgcacttcgtccgcacgcaacgtaacacgatgatgttctaaagatgcggaatccccagtattttcagcattatccgaatgttcggaagattcggcaacggctttcagcggaaatccgaccacacgatcgccgtgcgccgccgcagcggtggcggcaacgttccgatacgcctgatgtacggcttcggctttggccgtagcgagaatcatcacccgctgttccacgctcagatcgcttacggcaacgcccatggcggccgcctcacgttcgagcgccgccggctcgtccacgttcgatacgcgaatcgtggggcaaatgcccgccgagaaaagcacgtcacggcgaggcttggatttggaagcgagaatcagcggaatggagttgttcatgcgcgttccacctgcacacccttggtgtcgacgcccaaatgcagcacacgccaatgaccggaagcgagctcttcggaagcaagctgtcccagctgttcgcgagcgtcgccatgatgcagcacgagcacgcatgggccggcgccggaaaccatggaagcgaaaccatgggaacgcagcttttcgatcagcgtccacgacggttccatcaaaggagcgcgatacggctgatgcagacgatcctgcgtggcggcgaacagcaacgcgttgacatcctgacgctgaccagtcgccagcatcgcaggattcatggcggccggcagcaggctcacgcgagacacattgtgcacggcatccttgaacgccagctggcccggcagcgcctggcgtgccttttcggtggacagctcataatccggcacgaacacggcggcggtcagatcgtcggcaacgcgatagttgatggtatggaagcccttatgcagcggttcgccgcccggaatcggcacggaaccgacaccttcgggggtttccatgtcccaagacatggtgagcccgccgtacacggccggagccacattgtccggatggccttcgatggccgcagcaagctcaaacacggcatcacggttgagttcgtcgtcctgcgcgaaggcggccgcggctgcgatgcccgccacaatggcctctgcggaagagcccatgcctcgtgcctgaggaatgttgttgtgagcctgaagaatgaagcccacacggcccagaccaaaggtctggcatgcgcggcggaacgtggaaaccaccaagtgggtttcgtcacgcgggagagtatcggcgccttcgccttcgatcatcacctgagccgcagtgttcaccggatcggcgctcagcgtgaattcaagttcgtcgtggtagtccagagcaagtccgaccgtatcaaagccagaaccaagattggcgctggtagccggaacacgcacacgcactttacgagtaactggagtcatatctcgtcgtccttcgtcacatcttctttacaaatgtagcaccgtatacccgaaagggtacaagagtcaaattcaagcccataatcagcgggcgattgagtaaacaatcggcaagcaattgcccaacacagcagccggaatatgaataaagagacggccgcccaatcgcaacgatttgagcagccgtctcataactgttagttgagcacgcgaaggatggaaggctcgccaaccacgcagtcgagtgcacacacgtctttcacggtttcacgcagggtaagctcgtcggtcatgtgcgtgacaaggcgcagctgctgcagttcgccgtcgtagcccggatccttcagcgtgggcttgagatcctggttcacaccattgatggacacgccatgttcggcgaacttggccgcaatggccgcaagtacgcccggattgtcgtgaatcacgaaacgcaccgcgaactcggccttggaagcctcgatcggagccttcttcaaatccttatacaacggaatggtcgggccggtgcagccctgtgcgatgtgacgtgcttcggtcaccacatcgccgaccactgcggaagcggtcggagcgccgccagcgccacgaccgtagaacatcagatcgtcagccgcttcggccttcacgaacaccgcgttaaaggaaccatgcacggaagccagcggatgctcgttggaaatcagcgccggatacacgcgggcagacacgccggcctcgccattctccaccacggccagcagcttgatgaccttgttttcggcggttgcggcagcaatatcgtcggcggtgatcttggtgatgccctcaacggacacatcatcgatggtcacgttggtgtggaagccgagcgtggccatgatggccgccttgttggccgcatcgtagccttcgatgtccccggtcggatccgcttcggcgtatcccttggcctgagcgtccttcagcacgtcgtcgaaatcaagacccttggtggtcatttcgtcgagaatgtagttcgtggtgccgttgacgatgccgagcatgctcgtcaccttgtctccgacgagggattcacgcagtggcttgaggaacggaatagcaccgcccacggaagcctcgaagtagatatcgacgcccttggcttcggcggcggcatagatttctggaccatacttggccaacagcgccttgttggcggtaaccacggaagcgccggattcgatggccgcaagcacgaacttgcgggccacgccggttccaccgatcagttcgactacaatgtcagcattggtggccacgctcatggtgtcggtggtcaccacggacttgtcgatccacgggaacgggtcggtttccgacggatcaaggcaggcgacgccggtcagttcgatcggtcgtccgatgcgtgcggcgagctcatccttctgctccaccagcaggcgtgcggtctgagagccgaccgtgcccgcgcccaacaatccaacgcgaatcggcgcaacatcttcctgtaccaaggcatcctcccttgaatgtgaagtattggtgtaaccctgcctattgtacggtcccgatatgacgtaagaccgcgaaatcatacgaaaatggacggtttctaagctttgcccagaaaaccgtccatactacatccatgttgcgtccgcaatttgagacgaatcgccatgaacaatacgaaacacgagcgaaacgccacgaatcgctattcgctcacatcccaatccagcagatcatcgaccgtctgacggcgaatcatcacatgcgcgtcttgctcggatatggcaacaaccgcaggaatcagcgcctgattgtagttgctggccatcgtgcgaccgtatgcacccgtaacaggcaccgccagcacgtcaccacgctgaatatcggcaggaagacgcacctcgttgacgatgatatcgcccgattcgcagtgcatgccgaccacacggcacagcttggtttcgctggaaccctcacgattggcgattctcgcagtgtaatccgatccatacaatgccggacgaatattgtcgctcatgccgccgtcgacagacacgtacacgcgttccgtaaccggattgccagccttgtctttcgcggttccggcaagctgcaccggcttgaccgtgcccacacgatacagggtgacgccggtcggggcgaccgtccaacggcccggctcgaacgagatgaccggagcgggcatgccgagcgcacggttcacggtggtgaccgcatcggcaaggcgggcaagttccgtatcgagatccatggaatcctcgccatcggtgtaggccacggaatagccgccgcccaagtcgacctccggcagggtgtatgcgtcggtggcgtagaaggtcttgcgcagcagcatcatgcgcttcgcggcctggataaaggcgtccgcatcgtgaatgttcgatccgatatgcgaatgcacaccgaccagttcgagcacgtcctgatggcggtagatctccttcaatacggcgagcgcggggccatcagccaccatggtcatggcttcggcgagtttgcggtcgccttcggaaaccttctcgtggctcatgtcgtacgggtatttgatgtcgtactgcagttggcgttctgcgctttcgcccggaatggcttcgctttcacctaggcgtgcgttcgaccctgcgggggtcacgtcagccaaatcgtcgagcacgttcagcttgcttgcatcggcaccaaccggcagcaaggcgacaccgaacttctggtcctcatgcgcggtagacacgaattcgtggccgcccgcatgaataccggacgtaacacgcaacatcacgcgagcgcgcttgccgagacgcttggcgatttcggcgatgcgggccggctcgttcggctcgtccaccacgattttggcgaagccttcggtaatggcgagttcgatttccgcatcggacttgttgttgccgtgcagcacgagtcgccgtccgggaacgcccgcggcgagcgcgatgcgcatctcgcccatggtgcaggtgtcgatcagcatgccggattcggtgacgatacggcagatttccttggaaagcagtgcttttccggcgaagctgacgtgggttacggtgttgttgaacgcatttgccgcggatttgacgaatttggcggcgcgggctcgcacgtcatcggtgtcgatgacgtagagcggcgaaccaaattcgttcagcaggctttcggcagtgcggccatggaacgtgatttcaccttgctcgttcacgttggagccggccggccagatgggggtgactgccatggcgatcacatcctgtctggggctgcgacgccaagcaggtcaaggccttcggcgataaccgtcttgacggcgtcattgagcttcaaacgtgcggctgcacgagccggttccggagccttggcgatgcgcagggcttcagcctgttcgccgcgagcttccggatcggtgagctccatgggaaccacgcgttccacgttgtaccacttgtggtaggtggcggcgaggtcttccaagtaatgggctacgcgatgcggggcgcgcaggtctccggcttcgcgcagcagggccggccactgggcgagcgcggcaagcacttcgccgtcggcggcggtgtcgagcaggctcacgtcggcaccctcgtaggtgatgccggcagcagccgcattgcgatccacattgcaggagcgggcgtgcgcgtactgcacgtagtacaccggattctcgttggaatgcgaagcgagcaggttcaggtcgatgtcgaccggggaattgtagtcggtgcgtgccaacgaataacgggaggcatccacgccgatagcgtcggtcagatcgtcgatggtcaccacattgccggcgcgcttcgacatgcgcactgccttgccgtccttcagcacgttgacgagctggccgataagaatctgcatgttttcgccaggttcgtcgccgaatgcggcgcacatggccatcatgcggccgatatagccgtgatggtcggcacccagcatgtaaatggcgatgtctgccggatcgttgtcacgatgacgcttgttgcgatagtaagcaatatcagctgcgaaatacgcgtagttgccgtcggacttgataatcacacgatccttgtcgtcaccatgcttggtggattcgaaccaggttgcgccatccttttcgtaaatgtcgccgcgttcacgcagatcggcgatcgccttgtcgacttcgccatcggaatacaagctgttctcatggaaccacacgtcgaaattcacacggaaatccttcatggatttgcggatttcgtcgaacatcatcggcactgcacgcttgcggaattcctcacgctgttcggaatcgccctcacccagcggattgccatcgttgtcaacgccaccgtcgacgcgcggcaggtcgagaatcgcaataccgtcggcatttgcctcatcgatgacgcgacgtgcgatctcatcgatataagcgcccttgtaaccgtcgatcggggtttcctcaccgtgggctgccgcgaccagcgacttggcgaaacggttgatctgctcgccgtgatcgttgaaatagtattcgcgcaccaccttggcaccgttcgcctcaagcacgcgggccatggagtcgccgaccgcggcccaacgggtgccgccgatatggatcggaccggtcggattggcggacacgaattcaagattcagggtcttgccggaaagatggtcgttcttgccgtagttcgcaccctcgttaagcacagtgtcaaccacggctgcggcggacgcggaatcaagcacaatgttaatgaagccggggccggccacttccacggacttgatgccatcggcattggcgagttccgcggcgaacagttcggcgaaatcgtgaggcttcatgccggccttcttggccagctgcatggccgcgttcgacgcccaatcgccgtgcgcgcggtccttcggacgcatgacggcgaatttggcctgcggagggatgagatcggtggtcagggtgccagccttgccttcattcacaaggttgttggcaatattgaaaatcagttcactaagcgcttctggactcattcctccaagtctaccgattatgcagacagaatcagccttgcgtatcgccccgcgtatcatcctgcagttcgccatgcttcctgcgccaagccaccgaagcgtaatagccgatatagcagatcgcaacgaacggaatcatatacagcaatgtgggacgctgcgacgaatcgcaaatcaccaaaaccaacgcgccgatacacatcacaatcgcagcaatcggcacgaacgggaaaccgggggcacgatacttcaaatcgtcagccgaatgcccttgatcaagccactgcttgcggaaacgcaagtggcagacggaaaccgacgcccacaccaccagtgtggccaagccggaaaccgcaaccaacgccaaatacaccgtcgaagcggcaaccacggaagacaacaacgccaacagcgatccagccatgctgaacagcaccgcgaacacgggcacaccatggaaattcgtcttgccgagcacgcgcgggatcataccctcctgcgcaagcgaccagaccatgcgcgagcacacgtacaagccggaattcgcagcggaaagcactgccgtcaacaccacgaaattcatcacatcgccggcaaacggcatgccgatcgactggaacacgagcacaaacggactcgtgtcgacgcctgaccgatgccacggaatcagcgcggacatcaccgcaatcgaaccgatgaaaaaaatcgcaagacgcaacaccgtggtatgcacggccttcggaatcgcctgcgccggatccttcgtctcccccgccgcgacaccaacaacctcagtgcccgaaaatgcgaacaccaccgtcagcagcgtcgaaaaaatcggcagcacaccattggggaaccagccgtcattatagaaattctcaaacagcggtgcgtgatcgtaaccggcaatcggaatcgcaccaaacatggcaagcaagccgatcacaatgaacacgataatcgcaaacaccttaatggatgcgaaccagaattccgactcgccatacagcctcaccgacagaatattgagcatgaacaccaccgcaatgaaggcggcggaccaaatccacgcgggcgaatcaggaaaccaacgttgcatcagcagaccggctgccgtgaattccgaagcgagcgccaccgcccaattcagccaatacagcacggcgatggtgaacgcggtgccggggccgatgaaacgcttcgcatacaggtgaaagctgcccgcatacggcatggccaccgacagttcgccaaggctgagcatcacaaaatacacaagcatggatccgatgccatacgcgatgatcgcgccaagagggccggcttggtgaatcgtgtagccggagctgaggaacaagcccgtaccgatcacaccacctagcgaaatcatggtcagatggcgggtttccatcttgcgttcaagaccgccctgcttggcttcagcggattcagcggcgtcagtgtctgcagtggatgcgttgacttgcgattcggccatgcgcgactgctccttcatatttggatgggcgcgttcttgcgttcttgcgtttgcatgcgtttgcacaatacccaatcgcattactatacggaaatcggtggaatcatgttgcctgccgttcacttttagcggcaatcctgagattgcataaacaaaaacaggctcgcatgcagcgtaagaaaccgcatacgagcctgaaaaaggattttctggagatttgcaatcagcgcactgaaatcagagcacagcgatggcgtcgatctcaacgagagcgcccttcggaatgttgttgccgccgaacgcgacgcgggccggcttcacggagccgatgaaggtctgcgcatacacgtcgtcgatctcgtggaagtcttcgacgttcttcatgtagatggtggcgcggcagacgtgttcgatgccggtgcctgcggcgtcaagaatatgcttgatgttcttcagtgcctgggctgcctgctcgccggcggtttcgccagccagttcgccggtgactgggtcgatgcccagctggccggagacgaacacgaaaccgttggccttcacggcctggctgtatgcgcccagcgccgccggggcttcagaagtcgcaaccgcttccatcttctcgctcataatgttctcctttgaagaatgtgttatgcatgttgcttgcgttcaggccgcggcaaaccacgacaacgcaatctcaagcaatcactgtacccatggaatcgacacgcattgccccatgttccaaataccggctccctgccccggctcttcacatgtctttgtggtgggcttgatggggatcgaacccacgaccttctgttccggagacagacgctctatccactgagctacaaacccgtgcgtcaaactactttacactgccttgagatgaaagcgacactttttacggaaaaacgatcttcgaatctcggatcattattgcgaaaacatagctacggcgggtctttcgacagcacacccaaccctagaggggaaataacgggcatagaacggggaaggaacgagagatagcgtgcgccacaacgaaatttgtagcaacataacaccatttgaagcgtcttttccactaaactgaaaatatggttgaggattcaggcagaaatataggcgatttcgaatacacgcgccgttttttctgccgtgccctgccgacgcagttggatgataacgacagtccgacgctgatcatacaaagttattacgtgcatcaggataattacgcgctgcgcgtgcgattgaaaacaaagtccgtccgcattgccatgactccggacctcgacccgctggctgtgctcgaaaagtatcgcgacgaattccggcttggatcagtcaccgtgaaagggccgtccgtgggaggcacgcgatatgaggcgagccgcgatttggattcgcgcatcgcaggggagctcatcaaacgcggcggacacgtgaccatcaaaaaccgtttcaccgactggatcgatgaggacggctggaacatcgacgtgttcggaggcaccaacgctcccctgatcattgcggaagcggaacgtatcgggccggtcaccaatctggtgatcccgaaattctgcaccaccgaaatcaccgaccaatcgcggttcagcaatgaagggcttgccgcgaatccatattcacgatggaaatccgaattcgaagacgaactggaagcagacggaccgcaattcctcgactatttcggcaccaaccgtatggaataagtcttttttaaaaaaaaacaaccgtaggccgtaaagaacgatgtagttgcgcagcctacggttgagcggtacctaaacggtacctaaagtcaataaacgagtcagtacatgagcgtggcgagacgacggcgggcgcgcttcaaacgctcgtcggtcggctcaggaatcgtgaaatattccagcagacgcttgcgcaccggttcaatatcggccttatggccggccgcaacgaaatccagcaaacgatcgaacgcatcctgaatctgaccgccgatcatatcaatgtcagcgacggcaagctgtgcttcaacatcatcgggattgtcggcagcggcggcacgcacctcacgcacgttcgcattggcggaacgggccaacagcaacgccttcgcacgctcgcgggcggcacgcgcatcgttcggatcggcttcaagcaccttctcgtacgcggctgcggcgccagcgtaatcgccctgctgtgccagcatatacgcctcctgatgctccggaggcacctgctcctgggcgctggcagcggaagccgagtttgccgcatcggaattcggatcgccggaatacggcgcggaaccggtcacaccggcctgctgcgcggctgcgaccagattcggaatcaccgtatccacgatctgctgcatttcctcagcggacggcaagccctgcaaaatcggcatcggacggccgttgatcaacgcgaacaatgcaggcgcgccctgcacttggaacgcctgcgcgatcgaaggattcgacgcgatatcgatacgagacagctgaatctggccgttcaactggttcacggcattgcccagctggcgtgccatatcgaacaggcggtcatcggtcggcacccacagcagcaacaggatcgggaacgtggccgacgtctgcaccatggcctggaacgtgttctccgtggtgtcgatcacataaccgccggcggccggagcaccaccagcctgccccggttcggccttcacctgatgcttcaacgcttcaagatcgacggctcccgccaaggaaactcccggattaaacggcctttgacctgccatgcttgcctcctagatatcaacaatcaacaacattaagcgcccagcgcaacacacattgcaaacgttcgccccaagcttacgcgcattcgtgcgactgtcacgatcacagtgcctcaacacgaaccggctggcgctcggaaccgactgcagtgatcttcgcgtcagaatttgccggaggcacgtacagcgcgaccacattcacatacgtggttttcatggtgctggtggcctgaccgtcgccaaacagcgctttttccgcatcggaagcaggctgcgactcacggccggagccagctgaacgcgtccattcggaattgatctgcgccaccaccagatcgccaccatccgcggaacgcataacgctgatggcaccgtcaaccggtgtgaacacctgctgctgcgatccctcgttcaactccatggccttctgcacctgttcggtcagatcggcaagcttcgtacgcaaatcgtcgtcggcaaacttctgcgcatactggctggacgcaccattctgcaacacgtcggcatacgcggcgaccgcatccttcggagtcatgaccagaccggtgtctttttccgttccctgctcgctaccggttttggaaatctcaaaactcggcatcttcacgcccgaaaacagtcgtgccacaccccacaacttgtagttctgacgtgcggaatcctggcggaacaccagcagacgcttggactgctggtcatccgtggtggaagtgatggaaaacaccgaacgcggccatccactgtccgtggaaatcacggcctgcgcaagatcagttggaatcgtggtcttgcggtcaagattgcccgtgacctgcgccacatgaagttcgctagtgcgaatctcaagttccggcccctccaaaatcgaaccgagggcgtcgatattgcgatcgttattgcactggtcaagcgttttgagaatattcgtacggatggttttctcttgcttggcggtcagattcggcgcgtcttgacgttgcgtggttttcggctgcggcagctgcccctcgcatccgcacatgccaacgaccattcccaatgcgagtacggccgccgcgattacgttgaaacgcttcttcatcacttggcctcctcgttgtcaggttcgtcggacttgtcgttgtcggattcgtcgttttcggatgtttcgttggatccgaccgactcggtcgttacggccatttcgtcaacttcgttgggcacgttgatttcatcggataccgcgaattctacagatcccgaggccgctgcggccgcactgctttcctcttgtgcgagacgtgcgaaatatgcggcaagctcgtcttgcgaaatcacggaagtctgttcgaaatcgtcgttttcttcaacaccatcagcggcagcgttctgctgatcggcaacgagattgcgcgcgccgggatcgacaatcgtaggctgcgcaacttcgttttggctattttccgaaccactcgcgcgatgcccagcatgacgacgacgcttacgcttcggcccgctcttttcgctacgggcggcactcgcttcggcgttcttcacccatgcggcaacctcgtcatcgtcaccctgcgtggaaccgatgccgtcaaccatggcaaacgcgcgcttgttgcgacgcttatgcggaggcatggcaaacacggaagccgaaagcaccgcaagtatcgccagcaatccgccggaaagatagaacggcatggcgaaattcagcatcgaacgacggttccaatcaagtgtgaccgaacctcccttgcgatcgccgtaatcgataatcgcaacggaatcctcggcattattcgtattagcacccttgaactgcatatcaacggaaccggcattgcatttgacggtgcgccacatgtcggaatcctggaaggcgacctggccttcggaattatcggcggtgccctgagccgtggtcttcagcgtggacagggtggaccagtcggacagtccggtgacgcgcgtgtatttggatcccgcgatccatccggcgatatcgcgggcggaaccgatggcgatgcacacgttcgcggatttgtcgtgcgacttcgccgaaatggtgacgcgatcgtcaaccaattgcagcacattcggatcggtgaccacatactgcgatcccgtaaccgaggcggacgccgtgacctgtgccgagggcttccaaatcgtcgcgttcaagacgccaagcacgatgcaagcaatggcaagcaagccgaaaataggcgtgacaatgccgcgcataatcttggcgtgtcgcgtgggaccagccttggactgcggcttttcctgttcttcctgcaataaagtcatagcattcactattctacattgcctctctgcaaaagcctgaaaaaactatgaaaatcaatgattgccactaaagtggaacctatgcgcaaatctactcttttcaaagccgtcgcagccgcctgcacaacgatcatgtgcttgggtttcgcggcatgcggaagttccgacacgaagtctgattcctcctccgattcatcttcgtcttcttccgattcctcgtcgaagatgaatcagatcgccggtgtgaccgccacgggcaagcccggtgagaagccgactgtctccttcaaaacccctatgacggtggaagacaacagctacgtcgtattgcagaaaggcaatggcgaccagattgaagacggcgaccgcatatgcacgcagggtatcgccatcaatgtcaaggatggttccgaactcatgagcacctgggagaaaaacacccccgattgctctacggtagtcacctccgacaccagtcagatgactgaggattattacaacattttcaaggatcagaagcttaacgccacgcttgcgttcggtgtgaacgattcgaattccgctggcacctcctatttgatggtgctcacgatcgtgtcgaagtcgaaggatctgacgaaggcaacgggcacgaaggtgcttgacgttcctgccgatctgccgaaggtgacgcttgcgaaggatggcaagccgtcgatcgatatgaacggatacaagggttccgacacgttgatctcgcaggatttgatcaggggcgaaggcgccgaggtcaaggatacgcagaccgtgatcgcgcactataccggatggctgcttgacggcacacagttcgattcctcgtgggatcgcggtgcttcgtcgagcttctcgcttgatgaggtgatcaccggttggaagcagggcttggcagggcataccgtcggctcgcaggtgctgctggtcgtgccgccggaccttggctatggagacaaggattccggcaagattccagcgaactctacgttggtcttcgtagtcgacatcctcgccgcctactgatctacatcacgattcgcttataaaaactccctgcataacaacagggagttttttataagctagaagagtcgtagggagtcgtcttcggcacctttcatttcgtcatagtcgaggatcaggcagtcgaagccgcggtcctgagcgagcacgcgggcttgcggcgtgatggtctgcgcggcgaaaatgccacgcacgggggccaacagcgggtctcggttcaacagctcgcagtaacgggtgagctgctccacgccatcgatgccgccgttacgtttgatttcgatggcaacatgcttgccactgccgtcgatggccataatgtcgaccggtccgatggcggtcgggtattcgcggcgcaccaatgtcgcaccttccccgatgcgttcgatctgttcggccagatacttctgcagatggtcttcgacaccgtctttgatcagccccggatcttcgcccaaatcgtatgtttcgtcggaataaatatgctgcaatgtcacttcgagcacgtcattggatttatccgccgaagcacgaatgactttctgcggaacctccgtagtcacgtcgtcgtcggcatgttccggagtgatgtctttgatggtgcagggcgccgccatccagttgagtggcttgtacgaaccaagttcggagaaaatcagcagactgttatcggctttgataagcaacacacgcttggcgagcggcaaggacgcattcaaacgcccggaatattcggcagagcaatcagcaacaataattcgcacgaggcactaccctaccatgattgtcgtaagccatgaatcccacgatatgtacaatcctatttttgttttgattaatcttttttttttaaaaaaaaacagtccgtctgctgcaactacagaatcgcaatcatatgcaattgctgcaatcgcaacagacggaccgtcagaagtatgctaccgagtgctactctgccatcttgacgtcacgtccacgctcaaccgcaacggtgagcttgttcgaatcgaaggagatgaaaccgtcggtcacttcgaaggagcgacggctgccatccggatccaccacaacgatggttccttccttgattacggtcaatacaggctcgtggttgggcaggatgcccattccgccttcaaaggcaggaatggtgacggacttcgccgtaccgtgccacacggggtggtcggcggcgacgatgttcacctgcattgtcaatccggccatcacgcaccgtattccttctgcatgtcgtgccacttcttctcgagatcgtcgatgccgccgataccggagaatgcctgctccggaacgtcgtcgtacacgccgtcgcaaatgcgggtgaacgcttcgatggtctcatcggccggcacgtaggagcccggacgaccggtaaacttttcagcgacgtagaagttctggccgaggaactgctcgatcttacgagcgcggttcacggtggtcttgtcttcttcgccgagttcgtcgataccgatcagagcgatgatgtcctgcagctccttgttacgctgcagaatcgccttgacgcggttcgcgcaatcgtagtgagcctggcccacgtaacgcggatcaaggattcgcgaggtggagctcagcgggtccactgccggatagatacccttggaagcgatgtcacgggaaagctcggtggttgcatccaagtgggcgaaggtcgttgcaggagccgggtcggtgtaatcatcggccggcacgtagatggcctgcagcgaggtgatggagtgaccgcgggtcgaagtgatgcgctcctgcagggcacccatttcgtcagccaggttcggctgatagcccactgcggacggcatacggccgagcagggtggacacctcggaaccagcctgggtgaaacggaagatgttatcgatgaacagcagcacgtcctgattttgcacgtcacggaagtactctgccatggtcagtgcggtcagcggcacgcgcagacgggtacccggctgctcatccatctggccgaagaccagtgcggtcttctcaagaacgccagcctcatccatttcgccgatcagatcgttaccctcacgggtacgctcgccgacgcctgcgaacacggacacaccgccgtggttctgggcgactcgctggatcatttcctgaataagcacggtcttgccgacgcctgcgccaccgaacagaccgatcttgccgccctgcacgtacggggtcagcaaatcgatgaccttgataccggtttcgaacatctgggtcttggattccagctgatcgaatgccggcgggttgcggtggataggccaacgctcggtgaccgtgatggtttcgtcatccttcttgttgaggatgttgccggacacgtcgaacacgtgacccttggtgacatcgccaacaggaacggagatcggaccgccggtgtcgagcacggtggcgccacgaacgaggccgtcggtcggcttcagcgccacggtacgcacggtagagtcgccaaggtgctgttcgacctcaagcgtgatcttcttcgtggtttcgccctcttcgttggcggtgttggtcagctcaacggtaagtgcgttgtaaatgtcgggcaggtggcccaccgggaattcgacgtcgataaccgaaccctggatacgcgtgacgcgtccagtggtcggctctgcagccgtctcgggagccgctgtggtctgattctcagccatatgcgttcctactcttccttcttattcagcgcgtcggcgctgccgatgatttcggtaagttcctgggtaatcgaagcctgtcgcgaagcgttgagcttgcgggtcaggtcgtcgatcaggctgcgggcgttgtctgtagccgtatgcatggcgttctgtcggcttgcagtctcggatgccgccgcggtgagcaggcattcatgaatacgggactggatgtacttcggcagaatcgcgtcaagcacttcgtcgacgctcggctcgaacgcataaagcggggtcgcggcatcggcatcggattcgggcacagggccggagtcctgctgttccggaagcacgagttcaacgggcagcatacgcagcacgcgcaccttctgaacaaccatattcacgaattcggtgaacacaatgtagagttcggaaactccaccttcgctcgccggcttcatgtaggcgtccatcagtgccttcgagatggactctgcgacttccacgccgggctggtcggtatcgccttcccaagtaccggcaacatcacgattgcggtacttgtagtacgtcacaccgcgacgaccatacacatacagttccggctgcttgcctgccgcatcgaggcgggccagcagcgattccgtttcgcggatgatcgaggaggtgtacggacccgccataccacgatccgaggtgagggcgaggacagccacgcgagggttgtcctcgtccttcttcacgatcggatggtcgatatgggtgtgggccaccagcgcttgcacggcgtcgaaaatcgcatcggtatacggcttcgcgttcaaggcgacgtcacgtgccttggcgatatgcgaagacgcgatcatctcctgcgcgttgaagattttctccaacgacgcggtggaggcgatcctagatttcaatgcgagttgcgagcccatggatcacttctctcctgcgacgatcttttcctgctcgaccggggtggcgttcttgacgttaggcttcttctcgaccagcggcttgcccgcgctggtcacgaaagtctcacggaacgcttccacagccttgtcgagggcagcctcggtgtcggcggtgaaatcttcggtctcgcggatggtcttgagaatatcggtgttgtggtccagataatccagcatggccttctcgaacggcagcacgtcgttcagcggcagatcatccatcttgccatgggtgccggcccacacggagacgacttcctgttccatggaatacggggagaactgcggctgcttgagcagctcggtcaagtgggaaccacggttcagctgggccttcgaagccgcatccagatcggaagcgaacatggcgaaggattccagggaacggtactgggccaaggagatcttcagcgtgccggagaccttcttcaacgccttggtctgtgccgcgccaccaactcgggacacggagatgccgacgtcgacagccggacgctggttcgcgttgaacaggtcggactgcaggaagatctgaccgtcggtgatggagatcacgttggtcggaatgtatgcggacacgtcgtttgccttggtttcgacgatcggcaggccggtcatcgaaccgccgccgaggtcatcggaaaccttggcgcagcgttcgagcagacgggaatgcaggtagaacacatcgcccgggtatgcctcacgtcccggcgggcggcgcagcagcagggagatcgaacggtaggcttcagcctgcttcgacagatcgtcgaagacgatgagcacgtgcttgccgttgtacatccagtgctgtccgatggcggaaccggtgtacggtgcgatgtacttgaaacctgcggaatcggaagccggggaggccacgatagtggtgtactccatggcgccggactcttcgagggactgcttcaccgatgcgatggtggagcccttctggccgatggccacgtagatgcagcggacctgcttcttcggatcaccggattcccaattacgcttctggttgatgatcgtatcgattgcgatagcggtcttaccggtctggcggtcgccaatgataagctggcgctggccacggccgataggcgtcattgcgtcgatggccttcagaccggtggacattggctcgtcaaccggatgacgatgcataacgtcaggtgcctgggcctcgagaatacgacggccttcggtcttgatctcgccaagaccatcaatcgggttgcctagcgggtccacgacgcggccaaggtagccgtcgccgacgggcacggagagcacttcgccggtacgacgcacttcctggccttcctcgatacctgcgaagtcgccgagaataaccacgccgatctcgcgggcgtcaaggttgaacgccaggccaagcgtgccgtcttcgaaggtcagcagctcattggccatgcaaccaggcagtcccgtcacgtgcgcaatgccgtcgccagcagtcgcgacataaccgacttcctgagtcggggtatccgacggcttgtacgactcgacgaactcatcgagcgccttgcgtatcgtggtgggatcaatggtaagttctgccatgatcactccttattgttgtttataaattcagtcaagtcttgtttcaggcttgttcaccgtgcggcgaaccgtcaggcggttgccttcaccgtgcgctgaagatgctgcagctgtgcgaccaccgtgttgtcggtgatctcgtcgcccacctggatgcgcatgccacccatgacggtcggatcgaccaccgagttgatgtgcaccggatgaccggtcttcgccgagtaaatggcgatgagcctttccacctgctccttgctcaacggcgttgccgtggtaacagtgaccatcgattcgcccatatggcgggagaatttgttgatcagccactgaatggtctgcaagtagcggcgattgcgcagattgcaggtcgcgtgttcggccagacgcttggtcaccttggtgaaatccgcgtctccaatcaggctgtacagcagcttgacacgggcttcactggaaacggctgcgtcatacagcttggtacgcacgaccggaaggttgagcagtgcggaatgcaactctgcgagctcgatggagacctgcaaagtcgtattggtgtaatccgcgtagtacatcatgccatcaacgccgaaatcctcaacggcattggcgatatcagacacgcggctccaacggcgagacaccagatcggacatgatctccatcacgagcggatgggcctggtctccgatcagagtcttgactaccgcaaccttgtcttcgactgggcgcgacgggtcggtgagggcacgttcaagctggatattgtggtcaagcgcgctggtgatcgtgaacagttcgttcccgatacgccatgcgtcctcaccgctgtcacgcagcttgggggccagcgagtcacgcgatacgcggtctgcgatacgcgatgcttctcctcgcattggtcacctccctttcttgaaggtttcgatcacttcttgtcgctgtccaagtcggcgatcatctggtcgatcatcgacgactgcacatcgtcattctcgagcttgctacccaggatcttgccggccagtgccgttgccagcacgccgacctcacccttgaggctcaccagagcctgctgctgctgcgattcgatggaacgctgggcggtggcggtgatctgcgccgcatcgttttcggcacgagtgcgcgcgtcagcgatgatatgcgatgcctccgtacgtgcgtcgtcacggatcttggatgcctcgacgcgagctttgctcagctgagcctcatacttcgccttggcttcatcggcatctttctgggcctgttcggccttggcgatgccaccttcgatcttggcagcgcgctcatcgaacacggcctggaacttcggcaggaagaacttgtagaagaacacggcgacgatgatcagaatgaccaacgaccagaaaatgtcgtagcttttcggaaggaacaattccatttcgctagctgcggtcaccatagtgtcttcctcctttcatgttcgtttgcgtcttcggtgttaccttgaatcaagtcttacttgatgaaggcgagcacgaagccgagcagtgccagcacctcgacgaatgccagacccagaaacatgagggtctgcagacggctgccgagctcaggctggcgagcggtgccttcgatggtcttgccgatcaggatgcccagaccgatgccagggccgatggcggcgaggccgtagccaacgacgttcaggttgccggcaacctcagcgagggtaacgatatccatgattgtttcctttctggttattgcttgacaagaagcaacaattaaaaagccggcggtcagtcgatctccggatagctcatattgatgtatgcggtggtcaggatggcgaagatgtaagcctgcaggcaagcgaccagcgcttcgaacaggaacatgaacatgccagccgcgaaggtgacgacgccgaatggcatgaacaccttgttcaccacatcaatgaggaagtactgcgtggccgaaaggcacagcgcaagaatcaagtggcccgaaaccatgttggcgaacagtcggatcgtcaacgagaacggacggataatcagcagctcaagcagctgaatcggggacagcagaatgtagatcggggccggaacacccttcgggaagatctcatccctcaggaagtgaccgaggcccttttcacgaatgcctgcaatccagtattggcagaagcaccacatggcgaataccagcggcagcgtaatggttgcgcttgccgcgatattgaagcctgggatgatgccacacagattgaagaccaacaacgtgcagaacacggtggtgatcatcggcacataacgcttgccgcgcagctcgcccatcacctgatagacgatgttgtcacggacgaattcgatcaaccattcgactgctccctgccaacggctggggatgagctttgcacggcttgccgtaattccgagaaccagcaacatgatgacggtcgcaaggatgcgaacgaggatgatgcggttgatggcgaacggcgtgccctgaaaaacgaacggatcgggaaggaagtcatcgacactgggcatttcgggaccatcagcgatggtcagcatgccctttcccaatgcaccaatcattcacgcctcctgctcttgtgtcagctgttagtttaacccaacaaccgagtcgaatgtgacgttctggttacttaaccaaagcgtacttcgaagtgcgcgtcgacgcgaacggagtcccgtgcgacgcattcgactccgaatggctggataggattattagcccgtgtctagacaacatccacacacttgggcttttccatactcccatttggttttcccggcgtttcgcagcaagctgtactaactagacacagctttgtgaatcgtcggatagccgacgcaaccaatagtttgttttacgaaaacagcatattgataaaacgtttcaccaagtatatcacatataacacaggtgctgcatataaagaaagaggggccgcatacgcaagcccccaccagtaaacagccgtaaagtcacgcgccaatcacggccgcatgtcaatcacatcaatatgcggatcaatccacaaatcaatcgcgaatcacgccataaccgtcacgcacgaacggcgcaaacgcgtcgacacgcggcgaacccggctgatgacgaatcgaacgatccgtgccaagacgcttctgcgcacgaagctgcggaacctcgctcaaatcgtatggcgtggtctgatacacccaattcagccaattgcgccacaggagattggcatgggcgcgccacgcgaacaccggctccaactgcggatcatcatgcgggaaatagttttcggggaacggcacattcgtcatgcccttcttcatatcacgctcatactcctcggccaaggtgtacttgccgtactcccaatggccaagcgcgaacacttccgaaaaatcacgggtggcgatcagcccaggaccggacttcggaccccacgtgagcacctgcaactccggattgcgcgcgatatcaccctcgtccacccccgcaaggcgagaatgcggctgcaggcaaatctcatcgaagccgttcgtcaaaaagcagtattcatcctgcaaatactgcggaaacacgccaaaaatcttctctggcaaattctctttacgcacgttatagcgataattgagcgcacccatcgcaccccagcacaaatacatagtggagaacacatgcgcggaagcccagtcaagaatctgcttgaactcatcccaataatcgacctgttcgaaatcaagatgctcaacaggggcacccgtcaccacgaagccgtcgtaatagttgtcttggaacgcctcaatggtctcatagaacttcaccagatggtcggcgctcacatgcgtaccctcgtgcgtggaggtcttcatgaaatcgatctccacctgtagcggacttttcgagatcaaacgcagcagctgcgtttccgtctcgattttcttcggcatgagatttaagatcaccagcttgagcggacgcacgcgctggcgctccgcttcaggcttttcaagcgcgaaaatacgctcggagtcgagaatgtctctggccggaaggccgctggggatcttgataggcatgcttctattatggtgcgggctcggatatggcgcacttccctgcccccacgatcagccgaaaccgttataggaaaaatgaataacgcgctatttgcaacgcggttttgcatggccggactgatgcgacacgccgatttgacatatttggaagtaatcgtaaaattaatagagctgtcttaaagacaagccgacgcggggtggagcagctcggtagctcgctgggctcataacccagaggtccatggttcaaatccatgccccgctactgatgaaagctaggaattgcaacaattcctagcttttttgttttccgtcaaatctcaccaaaaccaatttccggacaaaatctggacaaaatccgacaaaaaccgggtatatcagccgagttcatcaatcgcatgtgccgaaagtatggagaaaatgcgccggatccgccaatcgcatgtgccgaaagcgaagattgccgctcaaggctgaaaatccaacgttctccaaggttgcacgcgctacgttgacctcgccaaccacatatcaccagatataaggagaacaaggcaatgcattatatgaatcaagcgaacgcgcacaacgcgacgcaggacaccacaatgcaagacagcgcaacgcacgatacggcaacaaaggcaacgcaggacaccgcgccgctgaaaggcatcaccgtgattgactggacgcaggtgcagtccggcccgtcgtgcacgcagatgctcgcatggatgggcgccgacgtcatcaaggtggagaaggtgcagggcggagatccgacacgtaatgaaatgaacgacgtggatggctcgtactccctgtacttccttcagctcaatgccaacaagaaatccatcacgctgaacatgagagatccggaaggcaagaaaatcctcgccgaactcctgaagaaagccgacgtgttcgtagagaatatcggcccgggagacgtggaaaagcttggtttcggatggaatgacgtacatgcgatcaatccgcgtctgatcatggcgtcgctgaagggcttcaacaagggcagccggttcgagcatgtcaaggcgttcgagccggtcgcgcagtccgcgggcggtgccgcttccaccaccggctggtatgacggcgagcgcaatgtgcccacgcagtccggcgccgcattgggcgattccaacagcggaatgcatctgctgatcgccattctttcggcgctgttgcagcgcgagcataccggtgagggttgctatgtgtaccagtcgatgcagaatgcggtgctgaacttgtgccgtgtcaagctgcgcgaccagttgattctcgaccgtttgggcaagctttcctactatgactgctacccgaattatgagtggggcaagcaaggcaaagccattccgcgcgcagcgaatgcggagggtggtttggtgcttggctggtgctaccgcgcgaaaggctgggagcatgacccgaacgcttacgtatatatagtggttcaacagtccaagaagggcttcgagaatttctgccatgcgatgggattcgaggattggctgaccgacccgcgtttcaataccgccaatgcgcgtgacgagcataaaaccgaggtgtaccagcgtgttgaggcgtacaccatgcagttcgacaagtacacgctgaccaaggaattgggtgcgaagggcgtgccggtcggcccggtgctggattggtatgagttggagaacgatcctgatttgaatggggatggcacgattgtgaccattgaccagcaggatgcgcgcggcgatttcaagacgatcggcatgccgtttacgatgagtaatttcgtgccggattaccagcgtgcgccgaagctgggcgagcataaccgtgagattctgcatgcgttgggatatgacgacgatcagatcgcttcgctgcgtgattccggtgtgatcggcggtaacgatggtgtgcaggctgatttgaagtaacgcacgttagcgcgcactggcgcacgaataagggcggatcacaagattcgcccttatttgttatgcgtcacatccattgcagtccacgccccgcacttccgcacacaatcccatgtcttacgtctcacggtttaccgtcacaaaaagcgcatgcagtaacggaacgttggaatttcaacgttccgttactatatgcgcttcgtgagctacagtgaggatactgaatcagcccacgcagaaggggacgagccagatccacagcagacaggtggccgcgaatgccaccgtggcgacggccgtggtcgaggcgccttcttttacataaatgttgtaacggctggaaataatgatgcctgagaacgccggcggcaacgcgaccgccatcaccagcatcgaaatcttgttcatgtcaccgcccatgccacacaacagcgccacgccaaggaacactgcaggcgtcagaatcaggcggaagaacgtgttccagatggtttcccaaccgagcgagaatttcaccgtggaaagcgcgaggcccgcggaaagcacggccacaccggaattcgctttggcgatcagatcgaaggtcggcgccacctggcttggcacatgaatgcccaccaacactaggaaaatggccaataacgacgcccagcagatcggttgcttcagtgcgtcgagcaacgcctgcagattgccgttgcggttctttcccgtattcgacgtgccatgcaccataagttcggcggttttgtcggttacggcatctcgcgccgggtcaagcgtgatatcgccttttgcattggcccttgcattgaccgcgttttcggcctgcacgctaagcttcgctcggtctttggcctggccgaggttgatcagatacatgccgatcggaatggtcaccacgttgaccacgatggaaataatggctatgacgagattcgtgctgacggtgttgccgtaaatcggatcaagcacagcgaatccaaggaaaccaatcgtcggagatcctgcgatcagagcacagacggccgcctcctgaatgctgcggtggaacagcaaccggcacagataatagctcaccataaacatgacgatgacgccgatgaaactgatggcggtcaatgttgcgtctttcgcaagcattgcacgggtcgatttgatgatggacacaaataacgccgcaggaagcgcgatattcaacacaagtttattaagtccctgccgctgatcgtcatcaaaataactgaattttccacaaatataccctaatgccataatgacaataattggcacgatgtcgtcaacaagtatgtttatcactgtcgttcttcctttatattttttctatctgcaatcttctgcaatattgtttgattgctgatattgcggatattgcagatacgttgatcggatcattggttttcaggcagaaaaagtgggcgcacgcattccaccgttcgcacgcccacatgtcataccgacagccgatgcgctacatgcgagcgccggtcgcgtagtcgtacatggtgacttcggaatcaacgagggctccgaccaccggcttcggattcaacgctccgatattgccggattccttgcccgcatactgcgcgatctgcacatgcacgaagcttggcttgcctgattcgaccgcctcgccgaccatgcgttcgacttcttccggagtggtggcatagtaacctttacccccgaacgcttcgaggaccttctcgtaatgcgcgttgtaggtaagcgtcagcggcgacggatcaccgtccgctccaaggttttcgaagtcgccgcggtagataccgccgttgttgagcaccacgaaggtgatgggcagctggtagcggcaggccacctccacttccataccatcgaagccgaatgcggaatcgccgccgatgtacagcactttcttgccagtggaaagcgccgcgccaatcgcatagccggtgccgcagcccatcacaccccacgtgccgcagtccaaacgatggcgcggttcgagcatgtcgatgatgttgcggcaatcatcgagcgaattggctccctcattggtgagaatgagatcttcatggtgtttgctgtacacctttttgatggctcccaaggcgttgaaatggctcatgggcagctgatcggattgttcgcgggtttcaaatttcgtcacgtttttcgcgctggcttccttcagcatgttcagccaggtttcgtcagctttgaacgggtattcttccagagatccgttgagcagcgtcatggcggaacgaatatcccccacgattggtacgtcgatactgcgcgtgttttcgatttcttccggattgatgtcgatttggatgaatttcacatgttcgttccacgttttgccctggccgaacgacagcatccagttgagtcgcgcgccgaccagcaataccacgtcggcgttgcgtagcgcggtggaacggcagcttgccgtgctgtgtgggtcggtatcgggaactacgcctttggccatggacattggctggaatggaatatccgttttcttgacgaattcgcggatttcctcttcggcgcgggcgattgcggcgcctttgccgatcaccatgagcggacgttcggcctgctgcagcaatgcgagcgccgcgtcgatggattcgcgtgccggcaccatggcgggggccgggtcggttgccgtccacatcaggcggtcggcttcgctttggctcagggtctgtgccacggtgtcatcggggaaatcgatatacaccgcgcctgggcgtcctgaagaggcgatatgcatggcacgggctaccgcgagcggaatatcttcgatgcggtcgatgcgcagcgaagccttgcagaactgcttggcgtagttcatctggtcgaggccttcgtattcgccttcctcaaggtcgaccacatggcgggttgaggagccgccgatcatgatgaccggatagccgttcaccgtggcttccagcagtgccggtagaccgttgaggaatcccggagcggataccgtcaacgtgacagccggccgaccggtgatgaatccgtcggccgcggccgcgttcacagcgtcctcctcatggcgcatgcccacgaatcgcatacccatgccctgcgcgatgcgcgcgaaatcggtgacgggaatgccgaccacgccatacatgtttcgtatgccgttggccatcagcacccgcgccagataatgcggcgcatcggtgaccttccgatcatcggctccctgccgttcggcatccgcacgcatgctcgcgaccatcgtttcatctgcatgttcttctgtcatcgcaacctccattcgtatcgacgacgccatgattgtagatacgtgaaaatgggagttcgtcagcagaaaaatatgttcgtctgcggcttaatttcaacgttttcagcatgatatagccgtattctcacgcacatgcggaatatattgcagctgaaatatcgcaactctcatcgagaagcatcacctccgcgagacgacatcatcgccgcatatcatcgtcgccgtaccgcatacagcatgaacgccccgcagcacatcacggcagccgccaaacccaacaccagccccatcggacttcctgtctgcggcatttcctgctcgggggcataaaggttgtcgacattgaacgtcagcaggctatcctcacgttccaccacatcgttcagcaccatcattttctgcgcggtgacggcctcatccaatcccacggactggtatccgaccttgatattgacctcgccggcacccgttgcatgccaatacacggtggttccctccagttcggcccagccgactgccgtgggctcgtcgtcctcgtcgaacacggccggaccttcgatcgtcgccgtgaatacgccctcgatcggctgtccactcgaatccagcaactgcacgaacaggcttccggaccgcaatccctgccgatcatcacgcgtcaccctcgaagaaaccggcagcttgttcgcggcctcctcccaaagctcgttgaccttgctttccagcccgtccatcaccgagaagaggtattgctcatgcctgacccacaccttttggtcgtcatagttgcggtgcaccagcacgccgatcgccgcatacgtgagcaccggttccccgtcatgttgatattcggacagcagccatgcgaggcgccgcgccgcttccgtattttccacggtggtggtttcggtgaccttatagtcggtcatgctttcgatttgccggcaataatagaatttgcccgatctcgattccgcgttcaccccgatcacatacggttttccatcgagaaaatagttgtaatgcttgccgttcgcgcgcagcagctgttcggcggccagcgcggccgggcaggtcattcccacgattatgatgcaggccgccaataccgcggccagaatcgcaagcgtatgtcgtttcatcgcattcatcgcatcgtcctttcgatatgcacatcgttgttgtcgtaattcaacaggcttgcatacttgcgattgccacatggcctttttcaagggttgtggtcggaggacgttctttttgccgtttttgtggacaacttcgcttgtcagcaaacgtaacttatccacaaaaaacgttttaccaatcgtaggtaaacaagttatccacaaagggtggaaatcgctggtcggaagatagttcacccaaatccaccttttctcctctataatcggcggtatggcagaagaagataagagcgcggaaccgcgcaccaccgcaaccaagcaaccagccgtcaagaagacgaccgccaaaagcgcggccgccaaaacggcatcggcaacgtctcagacgcctagcaagcgcaccgccgcagccaaaaagtccacggcatccaccgctcgcaagcgcaccaccaaagcgaaggccgccgcaccgcaaacggtcggcgaagccccagcccccgtcatcgaacgcaccagccccgaacagttcggccgcgtgaacgtgctcgacatcaccccgaacgttgagaacggcctgttcccggcacgcgtggagctcggcgaagcattcaacgtcaccgcccaagtgttcatcgaaggccgcaccaaggcaggagcgaccgtgtccgtgcgtaacgcacgcggccgcgaggttgaacgtttcgccatgacctgcaccaatccgggcctcgaccgctgggaagccatggtcaagatcggcgaacacagcgatctgaagccgtgggatgccgattatgccgccgtcaagcgtcagctgggcgaatggcagatcgtgatcgaaggctgggaagacacctaccagtcttggctgcacgacgccgccatcaaggttgaagtgaatgacgacgtggagaatgcgctggaatccggcgcacagctgctcgcacgttgggctgacgcgaaggattccaagctttccgcagccgacaagaaggtgctgcgcgacgccgccaagaccatggaaaacaagtcgctgagcgccgaagagcgtctcgccgcagtccagagcagcgacatcgagcagctgcacgaaaccaacccgttgcgcgacggcctgtccgagtcgaatccgcagcgtttccgtgtggaacgcccgaagtccagcttcgcctcctggtatcagttcttcccacgttccgaaggagcctactacggtgaagacggcaagatcgttcccggcaacctcaagacgtcgatcgccggcttggaacgcgccgcagccgaaggcttcaacattgtgtatttgccgccgatcttcccgattggcgtgaccaaccgcaagggacgcaacaattccctggtagccggcccgaacgatccgggctccccgttcggcatcggctccgaactgggtggccacgacaccgttgacccgcagcttggcaccatggacgatttcaaggcattctgcgagcgcgcccacgagctgggcttggaaatcgcgcttgatttcgctttgcagtgctcgcctgaccatccgtgggtcaaggcgcatccgaactggttccgcaccaagccggacggcaccatcgcattcgcagagaatccaccgaagaagtatcaggacatttacccgatcgacttcaatgccgacatggaaggcatcgaaaaggaagtcgaacgcattatggatctgtgggtcaaggcgggtgtgacgatcttccgcgttgacaatcctcacaccaagccggtgcgtttctggcaggatgtgattgccgccgttacgaagaagcatccggaagtgctgttccttgccgaggcgttcacccgcccgggcatgatgcgcgcgctgagctatgtgggcttcacgcagtcgcactgctacttcccgtggcgtaacaccaaggaagagctcgaagagtacctcgaagagaccaacggcaatggcggcttctaccagcacaacacgttctggcccaccactccggatattctcaccgcctacgtgcgcgacaacggcattgccggccatgcggtgcgtgcggtgctcgccgctatgggcagcccgagctggggtatttacaacggctacgagctgatcgaaaacaagcagcgtccgggcttcgaagagcagatcgacaacgagaagtacgaagtcaaggtgcgcgattgggacagcaccgaaaagtacggcatcgccaaactgctgacctcgctcaacaagatccgtgacactcacccggcttgccgcagctaccacaacctgcacattctgccgagcgacgacgcgggcgtgatcgcattcctgcgtcagactccggccgaactgaccggtaccggcaaggcagatacgatgatcgtgatcgtgaacctcgacggacacaacgcgcaccagtccattgtgcacatcgagcttggcgacttcggtttcgccaccgacaagccgctcaaggtgcatgatgagctgaccggccgcgacttcgaatggggttacgacaactacgtttcgctcgccccttgggccgacgtggcacacgtgctcaccgtagtcgaagactgattgagtctcaatcgatctgattaatctcggtcagctcgactagaaattcgtttcgattcataccacaataccggttccacttcggtggaaagcggtattgtggttactgataatgcaaactgcccaatctcaaggagaaatgacatggcagaaaccttcaacgtcgtggtggaaattccgcgcggctccaagaacaagtacgaagtggaccacgagaccggccgcgtgttcctggaccgcaccctgttcacttccatgggttacccggatgactatggctacatcgacggcactctgggcgaggatggcgatccgctcgacgcgctcgtcatgatcccgaactccgtgttcccgggctgcgtggtggaatgccgcgccgttggcctgtaccacatggtcgacgaggctggcggagatgacaaggtgctgtgcgtgccggctgacgtacgtttcgacgacatcaaggatgtcgaagacgtttccgagtaccacaaggctgaaatcaagcacttcttcgagcagtacaaggctctggagccgggcaaggaagtgctgccgggcgattactggaccggtgccgccaaggccgaggaagaaatcgtggccgcccgcaagcgcctcgaagaatccgagaagtgatttccacgcctttctagatagctttaggtagcaatccgaggaaagcccgttgacgtacgcactcgcacacgtcaacgggcttttgcataccttccaacgtccagattccgccagtcactggaagaaaatgcccgcaaatcaacttctcagcgggcagattcctccagcgagtggaagaaacagcccgcagacgggatacactcatactgcacgcgcatattcgccggggccgctatagtggaacacgtaattcacggcatgcgaacagtattcgcagaattcaaagcccgctggctggcgcggcagttctatgtcggtacccctaggcgtaggcggacgtgagactccgtcgaggcccatcccgtgggaaaccggcgggatgaacctatataccagctatgttgattcaaacattacttattgccgtttccgtatcgatggacacattcgccgtttccatcggcaaaggtctcaccgtcaaaaaactacgcggcctcgacgcgttcaaaaccgccctctggttcggcggatttcaggcgcttttcccactgctcggctatttcgccgcctccacgttcagcaaatacgtgaccgccgtcgaccattggatcattttcggcctgctcgccctcatcggcggcaacatggtgcgtgaagcattcgaagaggatgaagagaacgccaaggaaaccgctgatttcgattggaagcacatgcttccgctcgccgtggcctgcagcatcgacgcattcgccgtcggcgtcagtttcgcattcatgtcgttgaacatttggatttcagtgatcatcatcggcatcaccaccggcctgttctccgcagccggtctgtatatcggtcgcgcgttcggctcgcgctggcagaagcccgcacagatcgcaggtggcgtcgtgcttattctgatcggcgtgaaagtattgctggaacatctcggattcctcgcataataatcgcaaatcagatatacaaataaatatacaaacttacagtaaaagcccgtaatcgcacatgattatgggcttttacattaccgattgccgcaaatacttgcgattattttcctgcgctttcgcgttttctcgcgattgcaggaatcacactattagaacatgacggtcgcgtacgatgcgataccgaccacaattccggaaatcataaccggcagcagcgcaatgccgatccacggattcttggattgcggatcgggatcggcatcacgattccaccaatacgaacacgcgtcaagcgcgataatcagcaacaacgccacaatcaccgcaacagcccacgccgtcgtcgagccataatcggtggaagccgcgttttcgccggaacgaatcggcagcagcgtcgataggaagcaccagcccgcgctgccaatcatggcaacgccttccacaacattgtgcgacagcgaacgaatcagatgcgtacggttctcacgcgccatctgacgcccgaacgaaaccacaatcagcaggatcagcagaccgccgacgccggcgatccagccttcctgcatccaaaacgtgtcttcgtcacccaaaccggcagggaaaatcgcacgtccgagcatcatcgtcgtggcacacaccacggaaagcaagcccgcaatcacggaaatcgcatgccccgcaacaccatcgcggaacgggttgaacacggcaagcagcgcaatcatcgccacggaagccacaaccgtgaacgacacgattgcgggctcttccgcattcccataggaaatgccgggaatcagagcaagcacaaccagcaccacatatgcggcgatttggacggcaaacaccttgccgaacgaggctttctgagccgacttgacggcaactttttcagaggcggtcatttcgtccccttttcatgattttccataatgtggtcattacgtatgcgataccattaaatgtagccgcaagtgtccacatagttcagataaaattaatgaaacgccgacaacacacaacaagagtacaatcgcggcaacgatacaaaaccagtacaagagacaaagggagctaacgtgacggatctgacgcttatgacgttcgctagcgacccagctaccgtgcttccttctctggcgctgctttcccaccgcgtacgcgtgctaccaatggacgcggcaagtctggtgaaaatgccggaaaacaccattctttttctggatgcgcgagatgatctggccacggcgaaaacattgtgccgcctgattcatgcatccggactgtccacgccgatcgtgctcgtcctcaccgagggtggcttcaccgtggtcaattcgcagtggggcatcgccgacgtggtggtggcgtccgcttccccggccgaagttgaggggcgtcttcgcttggtatccgagcgcggcaactcgccggtcaatgcggtttccggttccggagaatcgggcgtgcagaacgaagacggcatgatccactccggcgacctggtggtggacaccaacggctatacggcaagtctgcatgggcatccgatcgacttggcatacaaggagttcgagcttctcaagtacctcgtgcagcatccgggacgcgtgttcacccgcgcgcagctgctgcaggaagtgtggggctacgactattacggcggcacccgcaccgtcgacgtgcatatccgtcgtcttcgcgccaagctgggcggcgaatacgagcatgtgatcggtaccgtgcgcaatgtcggctatcgttttgatcctccggaagaagaggaaggcgaggcggcagccaaggacgccgcagcccacaacgcttcgagcgaaaactgattgtcgcactattcgcattgctggcattgcctacgatttgcgatgcttgcgattgccacgatacttgcgatctgactgtcggctatctcactttcgtacgcgcgattgcatattcatgcgacggtagactggtgccatgccccgggaatcgaaacaagcgcgactgtcacgcatgcatcaggaatacgccgtattgtgcgaggagattccgcatccgaaatgcgcgctgaatttttcaaacccgtttgagctgctggtggcgaccgtgctaagcgcgcaaaccaccgacaaacgcgtgaatatggtcacaccggaattattcggcgaatatccgggaccggccgcacttgcgagcgccaatcccgaacacgtggaaagcatcattcattccatcggatttcatcatacgaaggcaaagaacatcatcggactttcttacgcattgtgcgaacggttcgacggcgaggtgccgcaaaccatggatgctttgacaagtctgcccggggtcgggcgcaaaaccgcgaacgtggtgcttggcaatgcttttggcgtgccgggattccctgtcgacacgcatgtgatccgtgtgaccgggcggctgcgctggcgttcggactgggcgagcggctcccccgaccccaaagccatcgaacgagagatcaccgcctgcttcccgcccgaagagtggacggacctgtctcacaggctgatattgcatggtcgtgccatatgccatgcgcgcaagcccgactgcctcaactgcccccttaacgacacctgtccgagcgcattcgcagcgtaacgcgcatgcccgctgtagcctgtgccaactagactcagcaccatggaagacaccatggaagaagaaaacgggcgggaagccaagctgaaagccgaaatcacgcgatggctgatctttttcggcgtcgccatcatgctcagcgtcatgacttggctgggctggtcgctgacgaaccgcaaaaatccgattacctccttcaccacgctcgtttccgactcctccgtggccatcggcattcagggcagcgcgccggaatcgctcgacatccgcaccgaacagggcaccgcgctggagcaggcgctgctcgaaaacgtgtacgaaaccctggtgtcacgcagcgaaaccaacaaactgcagccgtcaatcgcgaaatcatggcagatttccgacgacggactgacctacacgttcacgctcaacagcaacatgaccttcgccaacggacacaagctcgactcgtccgacgtggtctggtcgctgcaaaacgtcatcaacaacaattacgtgggatccgaccaacttggtagtctcaaggaaatcaccaatcccgacgaaaaaacggtggtcatcaccctcaatcagccgaatccgtgccttctgcgcgcgttgagcgggcgtgccggcattgtttacgatgaggaaagcacggcgaattacggcaagaaagccgtgggatcgggaccgttcaccgtggaagcctcgtcgaaaacacagatcgtgctgcagcgcaacgactcgtattggggcaccaaagccgccgcatcgcaaataacgctgtattactacgcttccgaagattcgctggtcagcgccatggaagccaagaaaatcagcatggcattgccgttgagcgcgtctgccgccgatgagctcaaccagcaaagcggcatcaactccgacagcggcatcagcttcgacaaagtgatgctcgccttcaataacggcaccgaaagcccgttctccgacgagcagatccgcaaaatgacgagatacgccatcgacgcgcagaccatcgccaaagacgctccggacgcctattcgccgctcggaggcccgataagcccgctggaagacgggtatgaggatctgagcgaactgttcccctacaatcttgagcagggccagcagatgcgcagctatttcggcgcatactatatcgccgatatcgatctgctggtgcccaaggaatatgagcagatcggcaacaccgtgaaatcggcgatcgaacagctcaatatcggcgtcaatctggaagtgctcgattccgcggcgcaagtcacggaacgcatgaacgcgggcacctacaatatcgcgctcatcaccatgagcggcgaaaacgatgcgagcgtattcaccgacggccagagcgtgttccattatgagaacggcgatgtgcagcaggcatatgcggacgcgatggcggccaccaatgatgacgattatcaggcacgcatgcgcacgtatgcacgcgccgtcagcgaaaacgcggcaagcgactggctgtacacgcgcaagaatttcatggcggtaagcgaccaattgcagggatatccgaaaaatctgaccgaccgtctgctgccgttgagcagagtgaagttgcagtgattttcccgcgattgtcaatcaatcgccgaacactgcggacaatccgtgtgttgcgctgattttcttgcgatttcggcattcggctgcagttccgtaagttgtcacattcgctttctagactagcgtttatgactgaaagccaagataataccatcaacgcgaacctcacgccgctgcccgacaaggtcggcgtggacggtctcgaagacaagtggcgcgaagtctgggacgaaagcgaagtctacaagttccagggcacccgcgaccgcaaggccgtgtattccatcgataccccgccgcccaccgtttccggccacctgcacgtgggccacgtgttctcgtacacgcataccgatgtgatcgcgcgattcaagcgcatgaacggctacgacgtgttctacccgatgggctgggatgacaacggcctgccaaccgaacgccgtgtgcagaactattacggcgtgcgtgtggacacctccctcaagtacgatcctgatttcgtgccgccgttcgaaggcaccgatggcaagaagatcgacgccaaggatcaggttccgatctcccgtaagaacttcatcgaactgtgcgagaagctcaccgcccaggatgagaagcagttcgaggcgctgtggcgttccctcggcctgtccatcgactggacgcagacctaccacaccatcggcgagcacccgcagcgcgtggcccagaaggcgttcctgcgcaatctggcccgcggcgaagcgtatcagaaagacgctccgggcctgtgggatgtgaccttccagaccgcagtggcccaggccgagctggaatcccgcgaatatccgggcttctaccacaaggtggcgttccgcttcgaagacggcactccgatctacatcgaaaccacccgtccggaactgctggcagcctgcggcgcactgatcgcgcacccggatgacgagcgttacaagccgtatttcggccagtacgtctactccccgctgttccacgtgaaggtgccgattctggcgcacaaggccgcggaaatggacaagggcgcaggtattgccatgtgctgtacgttcggtgacgtgaccgacgttgagtggtggcgtgatctgaacctgccgctgcgttccatcatccagcgcaacggacgcatcgtgatggacaccccggactggatcgaagacgaggaaggcaagcgcatcttccaggaaaccgccggcaagacgacattctccgcacgcaagatcatcgtcgacgcactgcgcgaatccggcgatcttgacggcgaaccgactccgaccaagcgtatgacgaacttctacgagaagggtgacaagccgctcgaaatcgtcacttcccgccagtggtacctcaagaacggcggcaccgatcagaagctgaacgccgaactgatcgaacgcggtcgcgaactgaacttccatcctgatttcatgcgcgtgcgttacgaaaactgggtgaacggcctgaatggcgattggctgatctcccgtcagcgcttcttcggcgtgccgttcccgctgtggtatccggtgaaggaagatggcaccgccgattacgatcatccgatcgtgccgagcgaggaccgcctgccgatcgatccgaccgacgatgtgccggaaggctacagcgaggaccagcgcgacgtgcccggtggcttcaccgccgaacctgacatcatggatacgtgggcgacctcgtcgctcaccccgcagatcgtgacccgctgggaagagccaggcgaagagaaccaggcgattttcaacgccaccttcccgatggatctgcgtccgcagggtcaggacatcatccgcacctggctgttctccaccgtggatcgcgcgcatctcgagaacaagtgtctgccgtgggccaatgccaccctgtctggatggattcttgatccggatcacaagaagatgtcgaagtccaagggcaacgtagttgtgccagacaagccgatcaagcagttcggcgccgacgcggtgcgttattgggccgctgcggcacgtttgggcctggatgccacctacgacgaaggccagatgaagatcggccgccgtttggccatcaagctgctcaacgccaccaagttcgcactggccatcggccgtgaggatgagaaccaccatgtgggcgctccggcaaccgcaagctggaaccctgccgacgtgaccgagccgctggaccgcgcagccatggccaagatggccctcgtagtgcgcgaagccaccgaaagcctcaacaactacgagcattccaaggctttggaagtcatcgaaaactacttctggcagttctgcgacgattacatcgagctggtcaagaaccgtgcatacggcaccgcagactccaccggccatgtgccgagcgagaaggccgtgaagtccgctcgcaccgcgctgggactgggcttggatgccttcgcacgcctgctggcaccgtacctgccgtacgccaccgaagaagtgtggagctggatgcatgagggcgaaggctccgtgcaccacgccgcatggccgaaggctgaaacgtacgatgcggccgcagcagccgtctccccggagctgctcacccatgccggtgaagctctggccgcgctgcgtggcatcaagtcgaaggccaaggtttcgatgaagaccccgatcctttccgtgcagctgggcgtttccgatgaagcgcgcgaatccatcgaaagcgcattgggcgatatcgccgaggccggtcgcgtggtcggacgcatctccttcatgggagcggccgccgcactgaaggccgtcaaggaaaccgccgaagcagccaaggaagccgtcaaggaggccaaggctgatgccgaagcagccatcgacgtgattgtggccgacagcgaacttggagagccgccggctaaaaagccgaagaactaatggcaactgtaggtgaaaccggcagccttcgtggcaaagccgttcacttcacctacagacagtccacaggactgtctgcttaacggctcagccggctaaaaagcctaagaggggatcttccgcgattggaaggccccctctttgtgtatctggatcctatgttcatacttttttataaaacgggaactgcaagcagatattgagattgcgcggccttagcaggctgcgattgcacaggcatatccggatacagcttctgcaaagcctgctgcaatatttcggcagcggccgcaatttcaacggtctcgtcaatcaaatcgctattatcaggcacaatcaacgtgcgatttccggaaccagcaatgccgtatgctgcaatcggcaacgcacttgtcatcaacatttcggaagatgcggtttttcctgttgttccagtattttcagatgcggaatctaccgaatcgccatcgctggatttctttgattccactcccccgactttcgcaacgttcttcgacgtggtatcggcagccgcgccaaatgacgatcgcaggccgcccgcgtagctcatcacatcatccatgctgatggcgttcttgtcgtccaccaagctggccgcagtaccgtcggaagcgttctgctgattggccgcatccgcctgcgcgcgttcctctttgcgttgggccttgatacgcgcccgctcggcacggcccgcaagcgacgtctccgaagccgaggcaagtcccatagaccccttcaacgtaacttccgaaccatcgacagtatcgtcggaactggtcgaatcatcacctgcatcaagctgatccgcaaaacgaagcacgatctggtggaacgcactggcctgacccgtgtgctcgctcgcatccgccaacgcctgcatcgcatcgtcaaccctgcttgaagccgacttcaacttctcattgccgtcaatgctgttgcgcacatccgcaatcgcctgagattccaagttttgcgccgaacctgcggaagcccccaattccttaagccgagcggtgtatgcgtcggtgaaatccatggaatacggaatcatcgccgaagaaagctgcgactggccggcactgtaatccttggcgccacgctgctgctcctcgcccgcacgcttgttgagttccgccaccaaaccggatgtgccacgctgttcgatggtgcgaatcacctcgttcaccgcgtcggcggcacccgtatgtcggtatgcggcgctcacatcgttgaccgcgttggccagatcgaccacggactgcgccaccgcagtatcgccgttcaattcggccgcggtgccgagaatggcggtaagttgcgtggtatcgccaatcgatccggaaagatgcgtcgtatacgagccgacgtacgcgtcgatatacccgttgaacgcctgctcatgttcctgctcacgctgggcgatggtcgtttcggcaagctccttttcatgatcgcgcagttgttcgagctgcgcgatgagctcatggttgcgttgcgatccgacattcgtcaaaccatccaccaatgtggatgcgcgatcggtcaaactggtgagattgccatagcagccagttctttcggaatcgcaggcaacagcggcgacagacagcgaactcatggtgaagtttttcgcagtcacatacgtatgaatcgtaagatcctcacccggcttgcctaccgcagcgaccaatgtcgacgaattgccggcagacacaagcacgccttcgtctgaggtcgcgtcattgccgacgcggttgggaatggtgaacgcgacgatcggcgtcagatcagccgtttcctccggtcgttccgatttcagatcgatgcggatgccgaccacgcccgatgcaccggaaatcttggatgcgctgacggtcggaccgtccaaagtaaaggtcgccgttatatcccacggcagttccacacgctcttgcggcacgcgctgcgaagacgtcgcgccctcatctgcattcatgtccgtatcagttgcagaagcggcgtcactcgtcaaatacaagcggcccggctcatcaacggactcatatgcgctcatcacatcgtgcgaggccaccgccgagacgtactcgccgttccgacgcaccgcatcaaccacattcgaaaccccgaccgcgcatacgggagccgccgaaaccagcgttaccgcaatggacgcagccagcatgtgccgcagatggacactcgccacacgcatatcacgctcaccacgcgtgctatcggcatgatgggcacaagatgcacgaaacgcaacagaacgacgcatgccgagcctctcaatcgcaatcaaaacaacgttccaaagcaatcaatgtagcgcgcggcatgccccggcaagaaacgatttcgcggaaaacagacaggtcaggcgaatacgtcgagcacacccggatcgacgccgttctcggcgatgcgcttatgcctgcgcttggcttcggtcaccacgaattcgcgatacatttcggcgatgtcgggatccaacccggcatcgacagcaatgcggtgcaaccgttcgatctggtaatcctcacgcttgtaatcggccggcgcgaaacccgcgcgggctttcagcacacccacttgggacgtgtatttgaagcgttccgccagtagggaaacgatggccgtgtcgacattgtcgatcgactggcgcaatgcagcgattttcgccacggcatcggcaacctcgggattgctttgcgcggtgcccgcatcgatgacggtttcggtttcatgctcttcttctggccgaagccagtcatgttcgctatcgctcatgcgtacaagactaccgcgcgcatgtcacttggagaagtaccgttgcagcacaatcgtggtttccgtgctcaccggcaccgtttggtggatgacgttcagcagatcctcaagcttgcttggcgaggctgcgcgcacggtcagcatgtagctgggtgacccagccacggaatcgcacgacatgatgccttcgatatcctgcaatttggcgggaatctcggcttccttggaataatcgatcggcgtgaccgcaatgtaggcacgtacggcgaggccacgcttttcatcgtcgataacggccttgtagccgagaatcacattacgacgttccagtttctgcacgcgcgattgcaccgcggaaatcgacagtcccgtagcgtccgaaagctgagacagcgtagcgcggccgtctttctccagcatgctgagaatggtctcgtcgatatcgtcgaattggcccacgctcgcatgcgtggtgtcgggttcgttgccattgcctgtcatagatgcccctttccaacaagcattctgcatcagtccggtaggaccgactcccctatgcagctcacgtttccgtccattaccatacccaccccaacacacaatccgtcaactgcattttcgtaacatttccaacgaatttcgattttcaatcatttttctcctatttttttcatataccccctatatagcaatactattttcgtctttttactttcgatttcgtattttttcgtgcgtcgatttttacataccgtatgtccacaacgtgatcatccacattgccgaatcgtgcggaactttcgaaaaacaatcgaaacgcattcgaaagtagttgaaaactgcaaaacggaaaaacagccgaacagaaagacagccgaacgaaacaaaagggccgcatggcgattgtcatacgacccttggatgcgtaaccgcagattgcgattacctgcgattagctgttgccgttattcgcggtattgccgctctgctggatcagcgacgccatgaaatcacggttggtcgcggtcttcttcagacgcggcacaagcgtctggtaagcctgctcaggctccagaccgccaagcagacgacgcagacggtagatgatcggcagctcctgcggatcggtgatgagttcctcgcgacgggtgccggaagcgttcacgtcgatggccgggaacaggcgcttgtctgccagttcgcggctcaggcgcagctccatgttgccggtgcccttgaactcctcgaaaatcacctcgtccatcttggagccggtttccaccagtgcggaggagatgatggtcagagagccgccgttttcgatgttacgagcggcaccgaagaacttcttcggtgggtacagcgcctgggcatccacaccaccggaaagaatacggccggaagccggagcggcgatgttgtaggcacgggccagacgggtcatggaatcaagcagcaccaccacgtcctggccaagctccacgagacgcttcgcgcgttcgatggcgagttcggcgacggtggtgtggtcggaggccggacggtcgaaggtggaggaaatgacctcgccctgcaccgtacgttccatatcggtgacctcttccggacgttcgtccacgagcacgaccatcaggtggacttccggattgttggtggcgatcgcgttggcgatgttctgcagggtgatggtcttgccggccttcggcggagacacgatcaggccacgctggcccttgccgatcggcgccacgatgtcgatgaggcggccggtgagcttgttcggcgcggtttcctgcttcagacgctcctgcggatacagcggagtgagcttgttgaactgcggacggttctgtgcggcctccacggtcatgccgttgatggagtcgatggactgcagcggcacgaacttctgacgctggttgcggcggtcgcactcacgcggggtacggatggaaccgtgcacggcatcacccttgcgcagcccatacttcttgacctggcccatggaaacgtacacgtcgttcggacccggcaaatagccggaggtacgcacgaaagcgtaggaatcgagcacgtcgacgatgcccgcgacaggcacgagatcctctttcggctcctcgtgacgctgttcgcgttcaacattgcgatccgtgcgctcgttgcgctcgacgcgatcgttacgctcgttgcgatcattgttacggtcgccggtacggccacgacgctcgtcacgctcgtcataatcgcggtcacggccacgcaggcgacggccacgacgatccacgcggtcacccctatcgctgacgcgaccgcgaccacgacgcgcgaaatcaccgtcttcagcctcgtcacgacgttcgtcatcatcactgccctgcgaaggcaacgtggcgagaatgtcatcaagatcgcgcacaacgtcctcatccttcggcccttccaccgcacgacggcgacggcgcggctcaacgtcggacgcatcatccttacgatggcgacgacgatcatcctgcttcggcgaagcatcgtccaatcccagttcggccagcagatcggtggcagcgtccgcatcacggcggcgacggcgcttcggagcctcatcgatgctgtccagggcgttcaccgcggccatgacatcggccgcctcctcgctcgtcggagcctcagcctgcttgcgacggtcagcacgctcggtgcgctcggcacgttccgtctgttcggagcgctccgcacgctcagcgctatcagcacgtccggcaagggtcttcctaacggttttggccgtctgcttttcggactgctcagcctcgttggctttgctttcggcagcctcgttggacttgccggattcctcagccgtgttcgccgcgacctcagcgtctgcggtttgggcttcagcaggagccaccggagcggccggtgcagcggacttcagagctcgcacggtcacaccggcaggcgcttcaccgccggaacgagcggcctgaagcgtcgcgataagttccggcttacgcatggtggaggtgccacgaaggcccatctgcttggcgagctccttgagctcaggcagtttcatgtcttcaagattcgggctggttgccactggtttttgcctttcccctagctttcgcaagcacacgcctgcaacagctgtaaaaagagatacggaaatttccgccactgaaagtccgccgcgaaatatcacggttttcgaacttccctaaccatacaacgtcatccagaccaacgcaacgtaggcgtgccaacgtattcatgccaatcaagcattcaagtcaatgacaaatcgcaaatcacaatgcgaaagacccgccatgcgatcacatgacgggtctttcgctttaccacatgctttacagcaacaggtgcaggtcttgccggaacctacttttcctcgtgatagctcttgtcggtattgacggaccatacgttcttcttggacgtcttgccgttcttgatattgccgacggcctcgattgcggtggccatggaatgatccatgttgttgtaacgatgctggccgttgcggccgacgcaatacagattgccgaaggaatcgaggtattccacgagctcaggcatgcgatcgtaggtgtcgaaatatgccggatacgccttcttcacgcgctcacgatgggagtcgatcacgtcttgcggaccgttgatgatctgcatgcgcgtaagctcctggatggcgaacttcttcgcttcctcgtcagacatgttccagaaggaatcgccttcttcgcagaagtattcaagaccgatccacacggtgttgtcaacgtccttgaccaggtacgggctccagttgttgaagatctgcaaacggccgaccttgtagcccggatcctgcacgtaaatccagcaatcaggcacgatcggcgggttgccgagggtgggaatgtcggtggtgttcgacaggcgtaggtgcttgacgagcagaccaacggtcacgaagtcgcggtacggcaggccgttggcgatttcggtcatgtccttcggcgcgggctggctggaagcgtccacggcgttgatgagatccttgacgggcatggaggagatgaagtcgtccgcggccatttcggtgcggttgccttcggaatcctcatataccacggatgcgatcttgccgtcggcctggcgaatctccaccacgttcgcgtcggtgatgaccttcacgcccgcggcctcgcagttggcctcgacggtttcccacagctggcccggaccatacttcggataccagaattcctcaatcagcgaggtttcaacctcagcattgctgcgcttcttcggcaggagcttctggaacgcgttcttcagcacgcccataatgctcaggcccttgacgcgctgcgcaccccaatcggcggaaatctgggacggatggcgaccccacagcttctcggtgtacccctcgaagaacatggaatacagcttgcggccgaaacgattgatgtagaagttctccagattgtcttccggcagcttgtgcaccatggacttcaggtagctgaagccggcaacaagcgtaagcttcggacccatggccttcaacgtgttggcgctcagggaaatcgggtagtcaaagaagtggcggttccagtaaatacgagacacgcgatgacgcttaagcatcaccttgtcttcgacttccggatccggtccgcccggttccatatcgtgctcgcgaccgagcttcttgtcatcatagcttggcgcgccctgcagcggcaggacccccttccaccaatccatgatgcgttcgtccttcgagaagaaacgatggccgccaatatccatacggttgccatcatgcttgacggtgcgggagatgccgccgaattcgcgggtcgcttccaacacagtcacgtcgtagttctcggagccaccgtccttgacgagctcccaagcggcagtcaggcctgcagggccaccgccgataatcaccacggattgcttttgcgtcactttgaggtctccttatgaaaacaaaaatccctgatagtctacccgagggtagggaaacgaacaccgcaacttgtgcgaatgcttacaaaatcaagccaagtcagccggatatacggctatcgcatcatgcaaaacgcaatcatcaaaccggccgatgcacgacccgactgcgcggccaaagcgcgcaaccacattacgcgatccaactacgcgaccagcaaccgcacaactggcaaccgcgtgaccggcaactgcgcaactagatggaatcaggaatgtcaatatcggttttctgcacttcctcaacattgacatccttgaacgtgacgatacgcacgttcttgacgaaacgactggaacgatagacgtcccacacccaagcatcagtcaggcgcacgtcgaaatacacgtcctggcctgcggaacgcacattgaaatcgactttattcgccaaataaaagcgacgttccgtttcaacaacatacgtaaacagcttgattacgtcgcgatactccttatacagagccagttccgcgtcggtttcgtaattatcgagatcctcggcgctcatcacttaccttccgtatcgcgcttgcgaccacgaccaagcgtgcgccaccaagcttccttcgacgtcttacgctcgcccgccgtgtacggccagctgttttcggcatcggcatcgccagtaacggacttgcgatcatcatgctcgctttgtcgcgcaggttccgcgccttccgcgtccttccgcacagcctcggccacgtcaccagcaccatcggaagaagctttctgcacggattgcgcagctgccgcggcatcgttgacatccgtaccttccgcatcatgcttcgaagcattcttctcattcagtcggatggcaatggaatgctcgcgcgcgctcaacgcttccttgacgcccggattatcttcgatcacatgcatgccgaacgcgtcaagcgaacggatcgggtcgaactcgtcaaccagcgtgtccataacgatcagatcctggtaacggttctgcgaagcgttccacaaggcgtcgcgcgaacgaccggacggcacgaatcccaacgactggtacacggacacggaacgcgtgttctgctcgggcacggcaacccaaatgcgatgcatgccaaggcctgccggttccggcgcaagtccgtacgtcatcacgcgcggcatgatgtcacgtgaatagccacggccgcggtaatccttgccaagcaccacctgaatgcgcgcggaacgagcccaaccgtcaatatcgatcaggaaaatcatgccaatcacattgtcggaattcgcggcatcgatctcgccatcgccatcatggtcggcttcggtgatgatggaccatgcgatcgtgcgacgcgactccggatcccccacaccggattcggtcggcgtttcgccttgggaccatgccacggaacgacgcacccacgcatgcaccgcgccacgctcggcaacccgatccttgccggtgattccggaagcgccgatgtacgccccaatggcgtccatacgttcaagatcttcgatcacggacggacgcagatgcaccatctcgcccttgatagacggaatgacgatgagatccggcaattcacgcgactgctggtccaactgctcctgtgtcgcagcctcaacttgttctggcattattcctgtcccctacatcattgcaggcacgaccgtcgccgcacccataccgagggtattgtacccgactgtatgtcagctgtgaatccgcgcggcggcaatcgctgtacatattcctctaccagcataacctgatgttgaaggacatgtcggcaatcgtaagaaaatgcgcttcgcgattatgtattctctttctttgaaatcccttttccggaataacgaaaagaaaacgcacgtcccaagctttttggaacgtgcgttttcctgcgattcaacaatcggctgtaatcgtcagcaatcgttgtaaacgttacttgatcttgctcatcacgatcttggtgacggcctttgcgtcagcctgaccgcgagtggcacgcatgacggcaccaatgatggcgcccatcggcttcatattgccgctcttgagcttttcaacgatgtcaggattggctgcgagagcctcatccacggccttttcgagagcgccgtcatcagacacgacctggaagccatgcttcttgacgacctcatccggagtgccttcgccagcaagcacaccggcgacggtctgcttggccagcttgtcgttgagcttgccatcggcgatcagcttctcaacctcagcaacatcggccggagcgatcggtagctcttcgaggctcacgcccttgttgttggcttcacggctcagctcgcccagccaccacttcttggcacctgcggcggtggcaccagccttgacggtctcctcaagcagatccagagcgtcggcgttgagcacgtcacgcatctccaaatcgttgaagccccactcgcccttcaggcggttgcggcgctcgcgcggcatttccggcatctgagccttcatctcttcgatgtgctccttggtgatgtgcagcatcaccagatccggatccgggaagtagcggtaatcgtcggcatcggacttcacgcggccgcctgcggtggtctgcgaagcctcatcccagtggcgggtttcctgcagaatctcgccgccttcgctcagaatggccgcctgacggcgaatctcatactgaatggtcttttcaataccgcggaacgagttcacgttcttggtttcggaacgggtgccgaacggatcggacgggctgttgcgcagcgacacgttcacgtcggcacgcatgttgccctgctccatgcgagcgtgggaaatattaagcgcacgcacgatgtcgcggatggcgcgcatgtaggcaccggcgatttccggagcacgatcgcctgcgccaacgatcggcttggtcacaatttcgatcagcggaacgcctgcacggttgtagtcgaccagggagtggtcagcgccttcgatacggccgtcagcgccaccgacgtgggtgttcttgcctgcgtcgtcttcgatgtgggcgcgttcgatcggcacacggaacacggtgccgtcttcaagttccacatcaagatagccgttgccgttggttggcttgtcatactgcgagatctggtaatcgcgcggcatgtccgggtagaagtagttcttacgcgcgaactggctccactcggcaatttcgcaatgcagggcaagacccagcttgatggcgtaatcgactgcggtcttgttgaccaccggcagagaacccggcagaccaaggctcaccggggtgagctggctgttcggatcgccaccgaacgagacttcggccgggcagaacagcttcgtggtggtgctcagctcaacatgggtttccagaccgatgaccggatcgaacttcttgacggcatcggcgtacttcatcaacttttcagccattttgttttctttcctccgatgcttcctacttgttcaagccgtcgagccacggggtcttcagggactgccagatcggaccgttccagtcttcctcgagagccgcctcaagtgccgcggcaggcttgtacatggcctcgtcacgctgctgcggagcgaggaactggaagccaaccggcaagccgtcgtcgctcagaccagcaggaatgctcatggccggaacgcctgcaaggttggccggaatggtggtgatatcgatggcatacatggccatcggatcctcggtcttctcaccgaacttgaatgcggtgaccgggctggtcgggccaacaagcacgtcgaccttctcgaaagccttcttgaaatcgtcgatgatcagggtgcgcaccttctgtgcggaaccgtaccaagcatcgtaatagccagcggacagggcatacgtgccaagaatgatacgacgcttgacctcgtcgccgaaaccggcttcacgagtgtaggccatcatgttggcggcggtctgaggaacacccgccggcggcatgacgcgcagaccgtaacgcatgccatcgtaacgagccaggttggagctgacctcggacggcatgatgatgtagtacgcaccgagggagtacggcaggtgaggcagagacacctcggtgatctcagcacccatttcctcgagcttcttgacaccttcattgaaacgtgccataacgcccggctggaaaccttcgccgccgagctccttgatcagaccgaccttgaggcccttcagatcacgcttcatgccttcgcgggcggccgccaccatcgggcgagggccttccggaatggacgtggaatcgcgcttgtcgtggcctccgatcacttcctgcagcagagccgcgtcgagcacagtacgggagcatgggccgatctggtcgagcgaggaagccatggcgattgcgccgaaacgagagacaccgccgtaggtcggcttgacaccgacggtaccggtcagcgagcccggctgacggatggagccaccggtgtcggtacccagggcgagcggggcttcgaacgctgccactgcagctgcggaaccaccgccggaaccgcccggaacacgttcggtatcccacggattgtgtgtggtctggtaggcggaatgctcggtggacgaaccctgagcgaactcatcgaggttggtcttgcccagcagcggcatgcctgcagccttgagcttctcgatgacggtagcgtcgtacggaggcacccagccttcgaggatcttggaggccgcggtggtttcgatgcccttggtgacgatcatgtctttgatggcgatcggcacgccggcaagttccggcagtgctgccttttcctcatcggacttggcatcgaaggcgtcggcctgttcgagagcctgatcgccggacaccttcaggaaagccttgatgctcggctcggcggcctcgatgacttcgagatgcgcttcaaccagttcacggctggaaacttccttggccttgatcttagccgccatctcggcggcggaaagcttgacgagttcgctcatgtcactcctcccccagaatgcgcggtgcaacaaacatgccggcctcggaaaccggagcgcctgcggtcgcctcttcctgagtcagcggggtttccggcacatccgggcgcaggtaggcttccagcggaatcgggttcgcggttggttccacatcgtcggtagcgacttcctggaccttgttgatggattctgcgatgacgttcagatcgccctgcagacgggtgatctcctcgtcagtaagtgcaattcgggccaaatcgcccagatgcacgatttcttctttggtgaaagtaggcatgtccctaacattaacgcgtctgtgtgacgagcgcccgcccatttcgtctcgccccgcaaccacgtcacaccggcattgccggcacgccccgcacagtccaaaatcacccacccactggaggaatcctcccgctgacacgcccgcacagtccaaaaacctccagtcactggagaaaactggactctaggatgaacaatcctcccgcaaactggactgcctcccattttgagcaacaaaaagggaggcagtccaaaaggaaggtatcgtcacgcgaagtcaaggttgaaagccaaggttgaaaatcaagactgaaagccagaactagaaatcaaaactgaagccagaactggaagtcaaaactgaaagtcggaactggaaatcaaggctgaaaatcaggaacggaaattagggttggatggtggcgtgttgggcgatccaggcgtgcatggagactgctgcggcagctccggcgttaatggaacggactgagccgaactgagaaatgtagaccacgtcatcggccagctcgagcgccttttcagacaaccccggaccttccgcgccaaacagcatgaggcatcgcttcgggaaatggtaggtttccatcggcaccgcgccgggaatgatatcgagcgcaatcacccgcgaggccttcaactcggcgatacgctgattaatcgccgccaactgcgccatacaagtggactcgtttccatgttcaataccactcgtagctgaaacgtccattgaaataccagatggagcgcacccagcaacacggatctcagctaacgaagccgcctcgctcatgcaggcacagttcgctttttttgcattttcgcgcatgcggaatgcgattgcggccgcttgcgattggactgcggcgatttctccggcaatgcgcagcttccagcattcgacaagctcggctatggacgggtggttttcgacgtgctggtacagttccgtcatcagcgcgcccttgcgattccacttgtgcggtccgacgatatgtacacgtttcgcttggaatgcgttggcagtgcgcaccatggatccgatattgaaatcgtgcgtccagttttccacggcaacttcgaaatcatgccgaccatgatcgtcaagatcatctttaatggccgaaaccgtccagtagcggtaccggtcaagcacgttacgacggtcgccctcatcaagcagcacagtatcgaatcgacgatcataattcggtgattgcggatcatccggacgaggttcgccaggatgcgtttggccccacggacctacgcccacctcacgaaaagccggctctccggacgctttcgccgcaatatcaataggattaggctgatgcacgattttcctcacattcgtcgtccgatatttcgtcgacaggtaacttctgttatatcttccaccattcgcccacgatcaacatcggcaatcgcagcattgcccaccgcgattttggagatcgcctgccgtcaaccgcatccgtactgccgactttatttttcctttactcatgtcagcatgattccaacagaacaatacccgtgaaacattccatgaaacacggcggatgacatcattaaaaaaccgccggtacaaccggaaagtcgcgctggtcagtgaagctccgactccttgaagacctccacaaacggcagttcagcttcggacccatccaccggattgacgactttgatcgacgggtcggccatatcgacgccaccaaccaacgaagcgacagcaagcacttcggcgccttcgttcttcaccacggagaagtcaaggctcaactcattgccgttacgcaaggtgaccaaagaggacgtctgcacatatgacttttcagacagccaggaatccagcaacaccacacgtttaccggcaatcgaaggccccttgatggacggatacacaaaatccatcacaaaaccgttaaggttttcacctcgagaagcggccgcctggatcatagcggaaaccagcggaaccgcagccgcagtcagcgcaccaaccgcatcgaaatcatcaacggaatagccggcctcttccaacgtatccaacaaaatatgcccaacaatcgacgctccacgatggtcgaacaacactgaggaaagttccgagaacggcttatcggccatctcggcctgcagcagcgacttgagctgatcacgcggttcaagcatggcgaaatcaacggctgcgttcacagtatcgccagcggttgcggcagtggattcagcaaccggcttggtcttacggaaagtcttctcttcggtcatagtcccagcctaccgtttctactcgtcaaaagaatgacagtgttggtgtcaacaagcaacgtccaatatctcccatcaacagatggtcaacagaaaatcaacatttcaaaagtcaggccggtctcaccataaagatgaaaccggcctgaaccgaacccaagaaaccggcgagagcagcagattactcacttaagcgcgagaatccacttcagatctgtttcaaactccgcttccaggttcgcttccggactctcatctggtctcgcttccagccccgctgacgcaccggcgcaataccacacccgctcccaccagcaacaccatcacggcgattacgccactgacagccgaaccggtattggcaaccttgttgccggtcttggaagcagtattgttcttaccattgccagcagaattaccggaattaccaccagaattatccgaatccccaggtttgtccgaatctccgggcttgtccgaatcgctcttcagcgaagcctgcgccgctgtcaacgcttcagacgcctcatcgacgtccgcctgcgatagcccctcatccaaagccttagacagcgccagtttcgcagcgtcacgagcctcaacgaacgcatcccacttcccactgtcatatccgttgttgaccaccgccgcagcatccgcaacagcggaagacaacgcatcggtcttcgccatcgtgatcgacacgccttcatcggtaggattgatggtttgcatcagcccgttttcgtcgaaggtgatctcgtcgatcgcggtttcgcggtgaaagccaagcccggaagtaaacacgccaagcggagtgtagtgacggtgatacgccatgaaccagcgctcttcgccattcgcgtccaccacgtgcacttcggactgatgggccgtaccctgcaaattcttcgacgcgtccttttgcaggagcacgccatggttgtcgatatcagtcacggagccatcttccttgaacagcgacggcgaagtgccgtattcgacgtggtaattcgccgatccggcatcgtcgcatgaccacgtccagtgatagacgccatcgcgcttggacaccacaacggattcccggaagttgttcagaccgttgatccgtttgaccgttcccggcaccacgctcatcatgtcatcgctcaattgggcgatggccgccgaaccgttgccgtacaggatatacgacgtgccgtcatcatcggtaaaaatcgacggatcgatggcctgccccacagtcacaccctccatcgaacgcgtaacgatggggtctttggccgccttgtatgggccggcaggcgaatccgctaccgccacgccaatcgccgattcaccgctctcaagcttggcgcagtagtagaagtaatacttgccattctttttctcgatggtcggcgcccatgcggatccgacagaccaaggcgaaattgccgtattctcgtcgccattcgtggtcggctcgtgattcttatccacgtcgaggatcactccttcgtcggtccagttgaccaggtcggtcgagctgaaagcatggaagtaattcccactccatcccgagaagccatcagtcgtcgggaaaatccagaattttccgtcgaaataatcgatatccggatcggcatattgccccggcaaaaccggattatttgactgaaccgccttttcgagcgtccatttttcgctaacgataccaccgttgccgtccgaacattcgattacaagcgtatgcttcttggacatgtcaagcttgtcaccgctggcaaacgacttgccatcgaccgtgacactcgcatcgtcgtaagtcagcgcgaacgttaccggaacggcgttgatctcggcacgattgttcactacggaggtgatggttttcgcgtcgcaatccatgctggtacgcacgttgctgtgcttatcggtgccacgcaatgcatctgcttgcgacgaggtcggcacagtgcccacagtgatggatgcgagcgcgggcgcgttgttccgttgtgcgatttcgttggcgttcagcgttcgattccagatggtcagattgtccatcagaccggaatagtattcgccggatccccagttggctttgccgatttgcaggattcctccggtttcgccaaggatttccttgacgcccagcccggaaacgtccgtgctttcgccggcaagcacgccatcgatgtagacacgtgtcgtcttcgcgtttaccgtgacggtcacgttgtgccatccgtcgccgcttgtggtggccgatgcgttgcctcgaccatctcgactgccgtcggtgttgtatcgttcgacaacaacgctgccgaccttatcaagcactccgatgtagtgttcggattggttgtacgtcggggcagccgtggacggagccgcgtagaaggtccagccggtattgccgttggagtcgggcttagcatcgtaggagacggtgaactcggtggcgtccaacagcagtgcggcgccattggtttgcgtgacgctcagccaggaaccgctgcccagtcgagcggctttggtgccgttgttgccatcttcaagcttggccgttccgtggattccggcaactgccagatcgctggtgtaaccggtttcctcatcgtcaaaggtgaattgcgcgatcggattcttctgctgtgccagaggagtgttgggcgcggtatgttcgccgtaagctgcgagcacggcggtttcctcgtcgacgtttagacggacgacggtgccatggcggaatcgctgtccgaaattggctgaggcctttgagaatgtgcccgacttcttcagggacgacagttttgcgatggtccagccggcgtagcctccgttgtcgcccatcacaatccacgccccatcagtgccttggtacacggtcaaaccttcgatgcgggtgctcaatcctgattccgaggtcttgacgactttgtctccagtaattttcgacgtgccgtcggcattgacttcggagtcgcgttcaactagtcgggtccacttctgcgcttccagagaatccgcggtgtcgatcaccgtgtaccaatccgatgtggagaaacgatagtaggatccgtcatcgccttgcacgattgtggtgtcgatgatgttatgcaggtcggccgagctttgatcgatccagatttgaggattctcaaacgtggtgaagtccgaagtgtatgctttgtacactttcagcgcggtattgccagtagtgggattgtctccgcctgttgacaggtcgcggcttgaccaatacaccagatatttgcccgcttcggcgtcccagatcgcttcgggagcccaagcgttgccgactttgccttccaaaccggttgataccagttcaggatcggtccagatgacgagatccttggatttggcgaccacaagataggtgctggcgttgatctgattccaagaaccgcccgaagcgcttccttcggcgtgcagatcggtgccgagcatcacatacttgttgccgtccgcatccggctcttccaagcgaatcagatgcggatcgcggatgcctttggtgccttgcgtggaagacatgattgcctcaccatcgttcagcgcctgccatttcaggccgtttttgctgtatccgtaattgattttttcatagtcggatgcgttgaagtacagccacagatatccggctttcttggcagcatcgtcatctttgggatcatccttgccgtcatccggcttggataccgtcacggttgcctccacgggcatgcgggagtcgtcttgggcggttcccttgacggtgaaggtgccagccttggcgtactggtccgcgtcgatgtcatcccattgcacgtcagcatcctgttcggagccgtcagccattgtcagatgcacggtttccggcatcgtcggagcggtcccggcgttagtggacacgtcaaccgatgccaccgacttgaccgcgatgctcggcgcataggcttcaagcacggtctgatactgggcgcgggtgaccggaaccacggtgccgtgacggggcttgccaccatcggaattgacggggaagttctcctcgggcatcttgtcgccgattaccgtccacttcgaagcgtcggaaatgtcggtggtcgccatgggcacgtaatggttcggacctccgtgatagctgggctggtcggcgaacagatagtattggtatccgttcacatcgccttcgttggctttgaacagcgaggggccttcgcctgcggagaaggtgccaccgtatccgttggatttgtcgttgccgatcgcggtgccgacttcgctccacgagctgccggacaatgccgtgctgtagtctttgatgccggcttttccaatggaatcggtcagggtgttggacttctcctggcgcaaggtcatcgacttttcatccttgtagatgcggtagtaggtgtcgccttccttctgcaccgtcacatcaatggaacccgctccagcttggcctctccgatccacgtcaatccacgtcttcggtttggagaacgtgatgaaatcaggcgtcgtcacatacatcatgcggttgtaacttggcgaggtacgagtgctcgaatcgtcattgtcgtacagattcgaggcccagtagaccacatattcgcccaactcatcatcccagtaggcttccggagcccacgtgttgcccgcgctgtcgtcgctgaccttgatatgacgctggttcgtccagttcaccagatcattggattcccaaacctcgatatacagcgaaccgttgtactgtgccgccgagaagctgcccttcctgccggagatcttcagatcggtggcaagcatgtagaaggtgtcgccgtcatgcgagcgcatgatgaatggatcgcgcaatccctgttcgccttcggtggaggtgaacagcggagtgccttcattgagcgtattccagtcgagcgcgttgttgcccttggaagcggcgaggcttatcttctcgcctcccacgccttcgccggtgaagaacgcccaaatgtatgcctcatctttgctttggtcggaaggcatcggcgaaacggtgatcgggaattcccggtttgcggtggcaccgttgttcgtcgccgtcgcttccaatgtcacgttgacggaatctttgccggcagccggccgattcaccgatactttggcattgttctcgttatatccttcggcgatagaagcgttcgcaccgccatcgttcttgacggaccatgtaatggcggagccattgtcaccgaccgtcggcaccacgaaattgctacgaatatcgtcggcgtccaagatattcacggcatcaagatcgctttggatcttctcatcgtccgatatgatgtgcggaaccgtaaccttaaacgtccgcaactgatcgtccgagccgttgagcttggcagtcaaagttgccacagcatcggcttcaccggctgcggggcgagtaacttgcgcggttccatcttccgtgaaccggatcgcgttgttatcgctcgaccaaacgatcggcacaccgttgctttccgtaatgacggagaagttttcggttgcctcttgcgcaacgctgatggcgttgaacgcatcggtcgccgcagctagggaactgtcgtaaatcttgaaattgtcgatcagaccggtaaagtattccgcgccccaattcgctttgccgagttgcagaataccaccgtctttgccgaggatttctgtcagatcatggctttctttggcctccacgctgttcacaagtgtgccgttgacgtacattgtggtggattcgtcggatacgactacatccacgtgcttccagccgacactggaagcaccgctgacattggctcccgtgcgaccgcccgtggtgttgttgtagcgttcgaatgtgatcttgtcggttttgtcaagaaagccgacgtaatgctcataaccataggttggtttcgccgcatcgcgggccgcgtacagtgtccagccgctgttgccgcttgatgcgggcttcgaatcgtagctgatggtaatggcatgcttgccttgaagcaccgcactaccatccgcggatgtcaggctcatccagaatccgctggacaggttggctgcagtggtgccgtcttcgccggttcccgtggccgtctggccattaatcgaagcgacgatatttcccgattggtaggttccggtttgtcctgccgtaagatcgttgaaattcagatctacaagcaggctgctttcgttcttgtatttgtcaagcgccgatggctccgatgccatcgtacttggcgcaacgagcagaacggcagtcatggttgcggcggcgacgatagcgccggtcaaccgtttgacggtgagatgttttctcgtattcataaatattccttgaagaattcagcattagtgcatgcgattcatgcataacaaggaggatgagaaaccgtccggaaaggaggtaaatagaaccggacggtttctcttacggggcttcgtcttgttttcacgcgggatggatggaatacgtggaaacggaataggcgaagcgttcatgtgaagtcagcgagctgccttccagcgacgcagaacagccaacgcaccaccgatggccaggattgcggcgaccagcgctatgcccttgacattggcaccggtattcaccacaaccgcagccttcttcgcagtcttcttggtggtggtagtaccgggcttagtggtcggagccggagtcggatcaggatcaggagtcgggtccggagtcggatcaggatccggagtctgctcgattgcatcgtcagacacgttgaccaagttatcggtgtacccaccgtaggccgccgtgatcttggaaactttgcccagcgcgccttctggagcggtgactgtggcgacgccatcagcattgagcttgacggtttcggtccagtcgccagcggtgaagacaaccgatccggccacattgccgccgtccttggcggtgacagtggcagtcagcgtgtctctaccgcgctccagcttggtcgtggagtcagtcgcatccggagtggtggggttggcggtcgtccaacgatgcatgttctcggcgatggcagcaggcacattgacgaacgcaccgtggcgggtcggggtcggcatgccattggcatacacgtagccgctcacacccgcgttctgatccttctgagtatgccatccatcggtctgcgacagtcggttgttccaatcgcagctcagcagagcggattcgctggtcatgtacggctggtatccaccggaatcagccatgatgaccatggcatcccctgcttcattctgatacttgtctccggcgttgagcttgatagcctccggaccttcgaacggcaagatgcgctggtcaagcagctgccagccggtttccggatcggtatcgggagatgcctcctcggtggtggccgtcagcaccttcgaacgctcaaggaacgtggacttgccgttggtgatgtagcttccggcagcgccgctttcctcgttcttggtgaagcggtagtagtagtcgccaaccttgatgaccgtggagtcgatacgggaatagttggtatcctgccacatcaccggttcggtgaaggtcttgaagtcgcgggtgatgcagtacagcagcacgttgtacgcgtagccggtattggtgctggtcaccgcggtggaacgggtgtcgtcggtgtacatacgtgacgagaagaacaccacgtaagcgccgagcgaatcatcccagtaggcttccggagcccacgtcatgcccgcattgtcgacattgattttaatgccggtatcgccgtcggccgcgttggtgcgagtccagttgaccatgtccttggactcccacacttcaaccttgagcgaaccatactgctggttctggccccatccttgtgcggaaaccttcagatcggtggcgatcatgtagtacttgtccccgtcatgcgacttgagcacgtaaggatcgcgcaggcccttggtatcggcgtaagattcgatgaccggattggaattgttgatttccttgaaggagaagaagttgttgccttccgtggcagacatgtacagcgcttcgcccgtcttaccattcgtcttgtcggaatccgacaggaaggtgactgcggcataagcttcgtcaggcacttcgcgagtcttttccttgactatcaccgacactttggcggttttggtgacactgccgtcagcgttggccgcggtggcggtcagctctaccggcgcggcatcgccgtcaccgtatgcagggcgggtcacaacgcctgcacccttatacgggtcagcggatccgaccgacggcgcctggtaatttgtatcggttccggtgatcacattttcattggaagacgtccaagtgatggtggatccgtacttcgagccggtggaaatcagcggcagattctcggtggtcgcctcgttgacggcagaaatcgcggaatccagatcgaattggaccacggtcgccggatccaacggcttgacggtgacgtcaacgcttgcggaaacgccgccggccttcgtagtcgccgtgattgtggtggttccttctccgacagccgtgacggtgccgtcgctgccgacggtggcgacggaagtcttcgacgactcccatgtcacatcggtgctgatggcgttttcaggagaaaccgtggccgttagcttcgtagcgctgttttcaaccatggtcagtgcaccgtcaagcacgccatcgccaacgatcgtcacgctgcttggcaacgtgacgtccgcaccttgatagatcttgatgtcatcgatcgcgccactccaataagcgtcgccgctatacagggatttgccgatggttgcggcggtgctgcccagatcggccatggtgatgccggtgtttgccttgtatccgacaagttcgccgtcacgaagcatggtgagggtttcgccgtcgacgatcagcttgtagttgtgccagatattgtcattgttagacagcgaagtcttaaatccttgctcattgttccacttgttatcggaaatgacgaacttcgtggacttggtgctcaggtaccagaacaggtatttctgctggcttccacccacagagaagctgaaatagttgccgtcatcagcatgacgtgatttggcagcgaattccatggtgaacgagttgcccgccttggcgaacagctcatccgggaacgaagcatactggccattgcctcgcagagacaacgcctggttattgttcctgtcgccgaacgcttcgaccttcgcaccgccgttcatggtcaggttgtacccgttgccggatgtgtcagtcgcagttccgtcggaaaaatcatagctggcaagcaggttcagaccgcttgaagcagagggggttgccgaaccgttaccggttccggcgccgtcttcagcgaatgcgaccggcgcgaacgaaaccatcatcggtaccgtgaccgcgatggcaagcccacgtctgagaatatcgcgtaatcgttggctatgtcgtttcatgcactctccttgatttaccaccgccgcacacggttacgacatagagtgatagctagcgctctgcttatgcttcattactgcatcaccgttgttcgttctgagtcggcggcgctggtccgtatttattgtttttcttttgcttgtggccgcatggccggaccgtccatgtccaaccacgaaccgcgacgcgccctacaacactgtgaacgttaacggtctatgttctattcaaagctatggtgactttcaccacaatcccagccagtaacaattcaataacaattccagccagcagcccctttgcaacaaagacggcggaagccggacaatccccttaaaagagcctcatcaaggatttatagacccccatacaaagccaaatagcattacaacacccgctgcagcacttgctccaaagcacccataatacacccttttcacagcacctactgctcgttggtttcaggggcggtgagttcgcggatgtcggccttttctggcgcgatcatgtttacgggttcgatgattctgctctggtcgacgcgctgcagcttgcgtgcggtgaccagcacgcgcgattccagtgacgaggcgaacgcattgtaggcaccgaccgttttggtgatggcggaccccagcttggtggcgcgatcgcccaacaccgcgaaccgttcatacaattcgcgggacaggtcgaacagcattttcgcgtcatcggtcaggctttgctgctgccacgcgtatgccacggatttcagcaccgcccatagggtaatcggcgaggtcaaagccaccttgcgtgcaaacgcgtcatccatcagcgtcgggtcagtttccaaagccgcctgcagcagggattcgttggggatgaaggcgatcacaaaatcgggggcatcggcgaacgcgttccaataggccttgtcgcccaaggtcttcacatgttcacgcactgccttggcatgcgcatgcagcagctccgactttcgcgtcagctcctcgggcgtggcggtatcgggaatctcgcacgccttctggtagtcggcatacggagccttggcatcgattggaatggttttgccgcccggcatatggatgaccatatccggacgctgcgtatgcccatccacgtcggtgacgaccacctgggtgtcaaaatccacatgttccagcagtcccgcggattccacgatgttcctcagctgcgcctcaccccacgcgccgcgcaccttgttgttgcgcaacgcggacgacagggcgttggtttcgcggtcaagacgagcctgctgctcgccaaggcctttgagctgctcgccaagcgcacccatttcccgcttgcgaccctcttcgatctgcgaaaccttctgctgcagggcgtcaagattcttctgcacgggcgcgagcgcggacaataccttgctctgctcctgcagttttcgctcgttttcggcctgcttgcgttccgcttcggccgcggcccgctcacgctctcgctccactcgttcctgttcggcccgttgggcttgcgcgagctgcgatttgagataggtcaactgttgggccaacccttccgcctgcgtgcggtattgggtcaccgccgtggacaattcgctgatttcctgccgatcagcttcgatctgcgctttcgcctcgttaagatcagcggttttcgcatcacgggccatttcctgccctttggaacggcccgcgaaaaaaccggccgcggctccaagcgcggccacaaccaccagaagaatcaccacaaacacaggattgtcgaacatatgttctatataacagcatgaccaagacatcttggaagatcaaagttcgcaagacatccatgcccagctgcattatgcttggagccgaaagcatgctcacgaacatgcggcaacgcgagcacgctgaatattcgagaggcattcaagaggcaatccgggggttcggaaacacatgggattcgatttgtttatgacggtggcggcgattgttgcggcggccgtggccacttgggccatcctcaggctattcctaagcgaaaacgatgacatagccccctcccaccaacgcatcaccgatgacaagcccgccaagaatcacaccgaaaatcacaccgaaaatccagacgaggcagccggcgcaacacaccgaagcgacatcgccaagcgtctcgccatcgcaaccatactgaccgctcccacattcaccgtaaccatgctgacattcggcggcatcacacttccccactggctgaccaatccatggctgcacgccatcatcgccacgccggtcatgttctactgcgccgcgccgatgcacaatcgcggtatcgccgccctgaaaagccacacgctcaacgcggattcgctgctgtcgctcgccatgaccatcgtgtacgtctacagtctgctggcgtgcgtggtgtcatggattttccccgcggggtcacgcaatcagtatttcgctttcgcaagcatggtcgccgtgctatcgcttgcgatttcgctgatcgcgcaacgccccatggcaaagaaagcatcggaaggcgatattccgaccgcacaatcgcaagaaaagcaagaaatacaatctcaagaaacgcaagaaacacagcaaagcatggatacgcttatccaggccagcatcacatatgagattcgcacgcgggtaacgcagattaccgcgaccgtgacgatggtcatcgcggtgtggacgttcgctttgtggctgattttcgggcttcagccgaagcttgcgattgccgtgttgatcggtgcgacggttttgacggtcgcaggcttggttttgcaggcatacgaccgccaaccgtcacggtaaaacggttttcgcaaaagaaaatcgcgcaatcgcacgaaaaatgggcggacccgcatgtgcgcagtccgcccaccgtcaacggttagaccgttttcgtgactcggccaatcaacagtcagtcaggccaaaccgatcagccgaatgactccgaccgtcacttagcctctgccgaaaaatcgtcgtcaatctgccccggcgcccacgaggaaagctccaaatggtcgccgccggtctgatccacaagcacggtgtcgccgtcgtgcacttcgccggccagcagcatgcgcgccaactggtcgccgacttcggtttgtaccaaacgacgcagcgggcgagcgccatacgccgggtcgtaaccggtgttggcgagccaatcgcgcgccgaatcggtaacatccagcttgatgcggcgatccgccaagcgggccgaaacctgcgccacctgaatgtccacgatgccgccgagctcttcgcgcgtaagcgggtggaacataaccagttcatccaagcggttgatgaattccggcttgaactgcatatgcacggcgtccatcacggccttcttcttggcttcgtcatccagttcggtgttcaccaggaactgcgagccaaggttggaggtcatgatcagaatcgtgttcttgaagtccacggtcctgccctgcccgtcggtcaaacggccgtcgtcgagcacctgcaacagcacgtcgaatacttcaggattggccttttcaacctcatcgaacagcaccaccgaatatgggcggcgacgcacggcctcagtcagctggccaccctcctcatagccgatgtagcccggcgcagcaccgatcagacgagacacggaggccttctccatgtactcgctcatgtcaatgcgcaccatggccttttcatcgtcgaacaggaagtcggcgagcgccttggcgagctcggtcttgcccacgccggtcgggccgaggaacaggaacgagccggttgggcggttcgggtcggaaatgcccgcacgcgaacgacgtaccgcatcggaaaccgcttgaatggcttccttctggccgatcacacgtttgccgagatagtcttccatggtcagcagcttctcgttttcgccttgcatgaggcgtccgacgggaatgcccgtccagtcggacacgatttcggccacggagtcggcgtcaacgcggtccggcaccatcggaatatcgccacccaagccaccgtcagcaccgcctgccgcactgttcttggccgccgcctcgttttgttcggcttgcgcgatctccttctggatggccggaatttcgccatagttgatggcggaggatttcgccagatcgccttcgcgttcataccgttcggcttgggtgcgtagttcgtcgagcttcttgcgcaggtcgccgatgcggttgtgcccgttcttttcggcgtcccagcgtgctttcagaccgttgagtttctcgcttttgtcggcgatttccttgttgaggtcgtcgagacgttccttggcgctttcatcaagctcgttttccgctttctgcgcgtcggcatcgtctttcggattgccaagcaggtacgatttttccatcttgagacggtcgacctgacgctgcagttcatcgatttcctcaggcgaggagtcgagttccatgcgcaggtgcgatgcggcctcgtcaaccagatcgatggctttgtccggcagctgacggccggaaatataccggttcgacagcgtcgccgcggccacgagcgcatcgtctccgatggtcaccttgtggtgggcttcgtatttcggtgcgatgccacgcaggatggcgatggtgtcttccacgctcggctctcctacgaacacctgctggaaacggcgttccaatgccggatccttttcgatgttctcacggtattcgtcgagtgtggtggcaccgatcaggcgcagttcgcctcgcgcgagcatgggtttgagcatgttgcccgcgtccatggatccttcggccgcgcccgcgccgacgatggtatggatctcatcgatgaacgtgatgatctgcccgtctgcgttcttgatttcctgcagcacgctcttcaggcgttcctcgaactcgccacggtatttcgaacctgccaccatggagcccagatcaagcgagatgagcttcttgttttgcagggtggtcggcacatcgccggcgacgatacgctgcgcaaggccttccaccacggcggttttgcccacgccaggctcgccgatcagcaccggattgttcttggtgcggcggctcaggatctggatgactcggcggatttcctgatcgcggccgatcacggggtcgagcttgccttctttcgcggctgccgtcaggtcggtcgaatacttttcgagggctttgtaggagccttcggcgtcgggactggtcactttcgcgcctcctcggatcgttggcacggctttgcgtagcgcgtcggcggtcacgccgtattgttccatgatttgcgcgctctgattcggctttgccgccgcgatggcgatgagcagatgttcggtggatacgtattcgtcgcccatctgctgcatttccttgccggcttgcgcaagtactgcggatagttgcctgctgacttgcggttgcgcggtggtcgatccgctggcgcttggcagcgcgtcctgcgcttggtgcacggcggcgctgatgttctgcgcgttgccgcccgcggcttcgatcagaccgcggatcacgccgttttcctggcgcagcagcgcgtcaagcaggtgcagggtttcgacttgcgcgttgcctgctgccgacgcgttctgtacggcgtcggaaatggcttcctgcgccattgtggtgaacttctgttccatatcatcctccatggttcgcgccgatcgtccgtttttcgcacggtcgcgtcgacgcatatgtcgttgtctgatatgctcaaccgacttcaccaccattctattcccaaaagttgagcctgcaacactcaacttttgttcactaaacgggaaatcgcgaacaacgcagcacaaaggccgtcacccacgaaaggtgacggccttcatatcttcaatatgtcaatcagcaatcggcaatcagccgcgcaccaccacgttgcgcaggctgccgatgccttcgacgtgcacgatcgcctcgtcgcccggatcaagatggccggaagcgttcggcgtgcccgtcagaatcacgtcgcccggcagcagcgtcgtgaagctggaaatcgccgcgatctgctccggaatgccgtgaatcagattcgccgtggtgccggaagccagctcgacatcctcaccgttcagcgtgaaggagatcttcgcgtccttccaatccaaatcgtcgcgggtcacgatccacgggccgagcgggcaggaggtgtcgaagcctttcgcacgcgtccacatcgggtcaagtccctgcaggtcacgcaatgtcacatcgttcacgcaagtgaagccgagcacgtaatccatggcctgttcgaccgtcacgttcttggcgatgcgccccatcaccacggccacttccggctcgaaattcatatcgttcgagtacgacgggatcacgatcggatcgtccgggccgatcaccgacgtgctcggcttggagaagatcaccatgtcttccggagcgtgcttgatgtcggaatggcctgcttcatgcatgaactgcgcgtgcgcctcgtaattcttggccagcccgtataccttcgacgggatcaccggagagagcagacgaacgccatcgccatccaccggaaaacgctcgccggtcggcttcacaccggcaccggccagaggatgcccctcaagcgccacgagatagtccttgccgtcgctttcgtcggtctgcacgaaagcgtattgcggtacatcattatgcgaaaaacgtgcgattctcatgtctgccagtctacccgcaacaatcgtcgaatcgtccatatcatcgacatgcaacgcccgacaatcaaaaacatcgaaaaaaaaaacgggccatcacatcatgcgaaggcccgtcacaggaagaaaacgtcagataaaagcacgctcgccgaaaatcgcggtgccgacgcgcacgatggtggatccttccgcaaccgcaagttccatgtcgccggtcatgcccatcgacagttcgcggcaggattgcgtgcccggctcgccggattcgagaatatggtcgcgggttttgcgcaggtgctcgaatcccttgcggatggcggtttcgtcgtcgacatgcgcgccgatggtcatcagcccctgcaattcaagtccgtccaatgtaccgattttttgcgcgatgcggatggcatgcgagggatcgcagccggatttcgacgcctcacccgattcgttgacttccagcagcacgcccacggtgatgccgcgcgccacggccctgcgcgagattttctccgccaagtcaagggaatcaaccgattcgatggtgttgacgaccggcagcactttgccgatcttattgctttgcagctggccgatcagatggaacggaatatgctcacccgcaatagtggaagcgccggcatcgtcggcaacgcccaacgcgaatccgcgctccccgcaacgtgccatcaatccttcggccttcgccatcacttcctgcggacgattctcgccgatcatacgcacgccagcgtcgatcgcagccatgatctcacccacgtcgcgcgttttcgtggcggcaagcaggcgtacggaacctgcgtcacgcccggcatgctgctccgccgatgcgatgcggtccagcacacggtgcacgccatcggcgatctgcacggcacgcacaccgtcgatcacctcattggcaagattcttatggtccatatatgcagtcatgttcagcctcttgcgttcaatcccaactacctctaccagagtaagaagaagcccgtacgacggtctgaagtgaagcgataaagcgaccgatatccgtacgggctaataaaacagacggcagtagaagggggaacttcaaagactccgtccgacagcaactatatgcaagatttactaaacacgcgccgaaaaaaactttttttcttcaaaaaaaaattttctcagcgaactcaaattcagccttgcgattcgtctaatttgcgttccaaagcatcaacgcgttccttcaacgcaagcacctgacacgtcagcgatcgaatctgtcccaactgcacagtcaccaatcgttccctggtgtcggaagacaaggcgcccgtcgtggaattgcttcttgcggccgccataatatccagatccactttccaacgtgcgatattacgttccacacgcttgcgcccgataatcgcagggctcaacccagccgacgtgaaaatcgtgctcggccgctcgccatccaaatatcggcgcatgcaactgatctgaaaatcacgcgaatacgtgatccgattttccgtaaccgactcaaccgccggcaacgcacgaagatactcgacctccgtgttactaaactgccttttcgtcatatcgacctcattcatccgacaaaacggaataccattctcgtgctcgtagattaccatcacaaacgaacgcacccgaacggcacatactaccactttaacgtaaggctatgggggctcacgccacctgaatcgccctacgctaaacctagctaaaccccaacgggtacagttgcgtactgccacagtcaacccaccaaaggagcagccatgaccggccgattcgcaccaaccccatcaggacgcatgcacatcggcaacgtttacgccatgctcggagcatggctttccgcccgcaaatcgggtgattccatacggctgcgcatcgaagacatcgacgagccacgagtggttcccggcgccgccgaaaccatgatgcgcgatctcgaatggcttggtctcggttgggatgacgaaccggtattccagtcgtcgcgacacgccctataccaggaagcgcttgagcttctcagcaagctgagctttgacgaaatcagcgatattatcagtactggttccaacgattccaagccctgcagcactacagcaggcaacgaagcagccacctctgaggcaacaccgctcatctacccctgcttctgctcgcgcgccgacatccgcgccgcctctgcgccacaggaaggcgatcgtttcaccgtgtacccaggaacatgccgacgcctcatcgccagcgaaccgcagcgtgcgaaacaacgcctcgccaacaacgaccgccactcgatgcgcatcgccaccgccgacaccaccatcaccttccacgacgaagtattcggcacccagcaatacaacctcgcccacgacatcggcgacatcatcgtgcgccgctcggacggcatctactcctaccagctggccgtcaccgtggacgacctcgacatgggcatcaccgacattgtgcgcggccgtgatctgcttcgctccaacgctttgcaaatctacattcgcaaagcccttatcaacgcgggattcaagccttccgaaccgacacagcccttccatcctgccgacggttccaataaacctgacgatgtgaccatctcatacgcgcatctgcccctcatcgacaacgcagccggccaacgccttgccaaacgcgagcgctcgctcgatctcggcatactcacggcacacggcgccaccgcgcaacagatcatcggctattgcgcatggctgctcggattgcagggagacctgaaacacaccaaaccgcagcctatgagcgccgacgaagcgcttggcgtattcagttgggatgccgttcgcgccaacacgtcagaccgcacgctcgatcaaggcgagttcaacgcatatttcggactgtaggccctattctgcagttttattctgcagttttattctgcagctctattccgcaatcgcgttcagccaatccataattccgaatcaagcggatattcgttgatcgcacagccatccaaaaatatggactgctcctgcataagcggtgccgcttggccagcccccccccccgcgcgcacgtcatctcattgtcgatatgccccaaccggtgcccgacctcatgattgatcaccatcgtgcgatatcgcgccaagtcgccgcctcccgacatccacacgtccatgccggaattccaacgatcgtcgttgataatcacattgttgcccacacggcagctgtattgctccgaacataccgacgagaacgtcggcaaggtcgacgcttgggcgagcacgatattgaaatcgcaattgccgtccgtagaaggttcgaaaatcgcgcctgcgcgcccatccatgttcgctgttcagaatacgaaacacggcattcgaaaaatcttcgactgatccgacttcaccattggtgaccacacagtaatgatattgcaccatgccatatccgctgttttgcgccgtttgctgcgctttcgcaagtatttcgcttttctgatcgtccatcagcgcggccgactgctcgcgaagcgctttggtgacggcgtcttcctgcggttccgccgtttcctccgctgaggcctttgcgtctttcgtttccgacgattcctaggttttcttctctgattgttgcgatttcttttcggatttcgcggattgatccgttttttctgaatgtgttccggaattgccgatctgcgccgttttcgcatgtccgttcagtaccgcgttgaccagcacggcatgcacgctgcacgacgtacatgacacgatgacgcataatgcaagaatccaagccacgacgcttctgcggatgcggaacgcttccgtccgttcccggcggctcatggtggcggccgctttcggatcgagcgcacgcagaatggtacgaattcgcttcaatccggcctccttataaccctgccgtcacgcaggtggcagcatatctcttccgcggcaacactaccagccaacagtaggcatgcaaaaagcccgcttcccccgtaccggaaattttccgaggaaaacaggctttatgcaacagttctcatatatcaaacgcaacttatgcgacggtcaggcaaacaagtcacgaatgattgaatgcgatcaggcgaacaacttgaacacgaacgcacccacgatagcgcccagaatcggggcgacaaccggaatccaagcctcgccccagcgggaggagcccttggacgggatcggcaggatggcgtgcagcagtcgcggcatgagatcacgggccgggttcaggccaggaccggtcgggccgcccatggaagtcacgagaccccacacaatgaagccgaccacgatggaagcggcagcgtggtccgcttcgccccacggcatggacaggcagcacagggcgccgaacacgagcacgagggtgccgaagaactcgttgacgaagtagttgatgcggtcgttgtgggcgtcggtggtgcagaaggtgccgaggatggcgttggcgttttcggtgtccttatagtgcgggtagtaggtgatgtacaccacgagctgacctgcggcggcaccaagcagctgggcgatgatgtacggcagcacgaggctccagtcgaacaggccgttcacagcctgggcgatggtcatggccgggttgatgtgcgcgccggagacggcaccgaacatgagcaccgggatcatcacgccgaagccgtagcccatggcgatgttcagccagcccgcatggtggcccttggtgttcttcagttcaacgttcgcgacagcgccgttgccgaagatcatcagaatggcggtaccgaagaattcggccgcaagtttgacaaaagtcgagtattccactgctgtttcctctattgcttcttctcaataagaatcagattgatgtcgattccgctctcggcggacaacagcgtccaacactactccccgcactggaagtcagtatgccactaggtatgacgtcatagcgctggtttcatatgttggatattgcactcgtagtttgattcggcaaaccgcggtttcgccagttccaccattatcgtcagtactgccgaccgctgggcagcgtcacatcgaattcggaattatacgattgcgtttcgttgatatggtatgtggatccgccttggctgacccaagtaccgccgaattgttcggctttgtcgtcacctgcggatttcatgctgccggtccacgtaccgccagtctgcatagtcatctgcatttcggtaatggtcagacctgccgccttggcagagaatccccatgtgccaatgagattgcctttcgcagccttcttcggtgtggtcagcgtggccacaaccatggtgctggctttatctatagatgatgaatccactccgaagaactctgcaataccgatgtcttcgccatccctgtagaaatgaagattagagatgtcgtactgcgcgttggagcctgtcgacctgcccttgccaagagtgcccacgatcttgtcttctgcaatcagagtaacacgtcattattctcagacaaagaagcaaatcgatgatcggaccgcacgtgggcctttgagcatgtaggaaccaaagttattgcctataccctcggaagttattaccagggtggacgcgccggggggattgaacctggaacgcgtgtcttcatggagtgatgaggcgtcggccgacgtgcgggagccatagtgagtccgtcgcgggaagccagtagggccggtacgtaagtccatccacgggaattcatcgcaaagccttttccttagcatcccatttcctccacccgctggatgttttgcccgctgaaaggcttgctttccgggtaaattcccccagtcactggaggaatcaggactccgaagcgtgcgccatcgggtagatttccccaccggctggaagaatcaggacgctgagacgccagtcgatgggtggattcctccaccgactggatgtttcgcccccctggaaggcttgctttccgggtagattcccccagtcactggaggaatcaagatgctgaagcgtgcgccagcgggaagcttcccccaccgactggatgtttcgcccgctgaaaggcccacttccgggaagatccctccaccgattggatgttttcggactctgggatgcttacaaacgggaagattcctccactgactggaggaatcaggacgctggagaaccttgccgatagtacggatgcggagtacgaggaggataggcccgagaaacagtttctacgcaaactgcagtggatatgggagtagacatgcgagcatcagaaaacaaaaaaccttggaaccggagttccaaggttttgtctgtgccccctcagggattcgaaccctggacacgctgattaagagtcagctgctctaaccaactgagctaaaggggcgttggtcttgcgaggttttgttctcgctgagcacgagaagtaaatatactcagaatcaagaagaacgcaactctcggcgtgtcgcggttgtaaaaccgctatttttcaacgatttcgacatattgcgcaaatcgcagaaaacgcgattcaaccatcatatttcctacctaaagagcacaatcaaggcaggaaatcacaatttcttcacaaattcagttccttgcaatccagttgccccaaacgatcccgctaattcatttgcacagccatgcatgaaaactgacggtaaatcgctcttcttgagtgaatcagcatgcttcacgcaacacccacttaaggattgagcttaggttgcttccaagcaccgtttccgcacgagagaaagaaagtaacgaccatgacgtgcccaagttgtgacaaaccaactaatgacggtggctacaactgatcaaatatgaaaatccccctgcatagctgttttcagctggtgcagggggattttccatgcttaagctcagacgtatctcagtctgaagtcattcgccgtaaccgcaatgaatgcagccatagcgaatggggccgaatcactcagcgacaaccttcacggtgaaggaagcggagatttccgggtgcagagcgacggttgcagcgaactcgccggtggtcttgatcggatccacggtgatgttcttcgggttgacggcagccttggaagacagcgcgatggcgatcttgtcggcggagatgccaccgaacagcttgccggactcggagaccttggcggcgatttcgacgacggacccctcgatgagttccttggcggcaacagcctcttcgcgggtggcaacggccttggccagacgagcgcgcttcatggcctcgatctgggcggcagcgttcttggaccatgcgaagcccagaccctgcggaatcaggtagttgcgagcgtagccggccttgacggacacgacgtcgcccgggtgacccaggtgattgacggacttggtgagaataaccttagtttcagccatttttcaaacctctctaagatcagcgaccggaagtggcgtacggcagcagagccatctcgcgggcgttcttgatagccttggcgagctcgcgctgttcctgcacggaaacaccggtgatacgacgggaacgaatcttgccgcgatcggagatgaacttgcgcagcagggcaacgtccttgtaatcgatctcggtgaccttagcggccttcagtggattcggcttcttcttaaacggcttgaccggcggctgcggcctcttgcgtgacatcttgatgttctccttacaatctggaaattgcttttcttttaagctgcgatccgggtcggatcagaattccggttcgtcgctgcttccaccaaattcggaggagccaaaggaaccgaacgatgaggaaccggaattatccgaattgccccacggatccgatgccggagcaggctgcacggcgggcgcggcattggctggagcggcagccccaccctgatagccagcgccaccagaatacccggcaccgccctgatatccaccggcattgccggcgaagccaccgttgttgaacccgccgttgccgccagcgaaagcattgccgccacgattgccggcaaaattaccaccgttggcactggaggttcgggtgacctgggcggtcgcatagcgcagggacggaccgatctcatcgacctgaagctcaataaccgtgcgctgggaaccatcgttcgcctgataggaacgctgctgcaaacgaccctgcgcgatcacacgcatgcccttgctcaggctctgcgcgcaatgttcggccatgtcgcgccacgcggagcagcgcatgaacaaagcctgaccatcttcaaactggcccgtattacggttccaggtgcgcggagtggaggcaatggtgaagctggccacggacgagccgttgccaaccgtacggatttcgggatcagccgtgaggttacccaccacagtgataatcgtttcgcctgccatcgttacctacttactttgcagcttattgttttgcagcttgaaaagcttggaattacttacttgcgaagaatcttcgtacggatgacggattcgttcaggttcagcagacgatcgagttcgtcgctggtggccggctcagcggagtagttgaccacaacgtaattgccttcggtcttgccagcgatctcgtaggcaagcttgcgacggccccagatgtcgatgttctcgacagcaccgccttccttggtgacagtttccagatactgctcggtcaacttcttcagaccgcgctcatccagctcaggatcggcaatgaacatcagttcgtacttatgcgcagacatcacccacctccttcggactatcggccatggaccttccatggcaggagtgtgtatgcgtactgccttcacgcatctatatatgaaaggtataaagatacagttcagacaacctgttcagcatagcccttctgctggacgagcggcaattgcgcacgttctgtggtgcaggcgcgtcatgggcacccgcattgttatattgaatacggctatttttgtacggttggtaccgtatttacgcgactctagatttgtggaaggcgaagcatgtcggcgattctcgaaggcaccccggataagaaattggctttggtgacgggtcgtgcgtaccctgagcaggcccatgaaaccgcgaaatacctgggaatcgacgtgcttgagaccacggcctacgatttcgctaacggcgagatgtatgtgcgttacaccgaaccggtgcgtggtgccgatgcgttcgtgatgcaggcgcacaccgagccgatcaacaagtggattatggagcagctcatcatggttgacgccatgaagcgtgcttccgcccgttccattaccgtggtcgcgccgttccttggctattctcgtcaggataagaagcatcagggccgcgagcccatcaccgcccgcctgattttcgacttgttccgcgcagccggcgccgaccgtattatgacggtcgatctgcatgccgcccaggagcagggtttctttgatggtccggtcgaccatctcaccgccactccggtgctgcttgactacgtgcgtaacaacatgccgcttgagaacaccaccatcgtgtctccggatgctggccgtatcaaggtttccgaacagtgggccgcgaagctgggcaatctgccgctcgcgttcattcacaagacccgtgacaccacccgcccgaaccatgccgaagcgcatggcattatcggcgaggtcgaaggtcacgactgcgtggtggtcgacgacatgatcgacaccgcgggcaccatctgcgaggccgtgcgcacactgaacaacgctggtgcgaagtccgtgacgctggttgccacgcatggcctgctgtccggcccggccgtggaacgcctgaggaattgcggtgccaaggaaatcgtgctcaccgacaccgtgcccgttccggaggagaagcgcttgccgaacatgaccgtgctgtccgtggctccgctgttggccgccggcatccgttccgtgttcgaatccggatccgtttccacgctgctcaacggtctgcccgaagacatgcgtccccgcaatatctacgcctgattcgcgcaatcttttcaacgtaacaaaaactcgcccccatccggtcggcgagttttttaatgtcagatcttcccaaaaacggggtgccgcatcctacgtcggtaggatgcggcaccccgcgtatcaagagagaaaagagaaatctggctagcgtccgataggcatcctcgcttccgttatttggcgaatgcttcgcggatttgcgcggcattgccgtaggaggcctgcgcaccataccctgtggcggcgtatgccgaaacatacgaggcaagctcggccgcttcggaaagcgccatgcccgaggcaagaccggccagcacagtgcccatgaaggagtcgccgcagccggtggtgtccaccgcgttgacgcataccggggaaatacgctggatcggcgtttccgaggtggcgtccagcaccacggaaccgtcgccgccgagcgtcacgaccgcctgttcgaaaccgaatccgcgcatcgcttccagcgcatgattccaatcgaaaccgtcccaatcgtcgttttccggttcgtcgatgccgagcagctgcaccatctcatgctcgttgacgagcagaatgtcggatgcttccaccagttcggtcggcagcgacggggtgaacggcgaatcgttgagcagcactttcacgcccgcttcatggcacatgcgcgcggcggccgtcaccgtttcgatcgggctttccaagcacaggccaagtacggaagaccgtgccagcgcatcgcgcacggattccacataatccacggtgacctgcgcgttcgatcccggcgagtacacgatggtgttttcgccggttgcgtccacggtaatcacggttgtgccggatggtccgagcacgcggcgaacatgcgtggtgttcacgcccgcctcgcccagagcgccgagtaggaagtcggcgttggaatcggagccgaccgcgccgaacatctgcacggttgcgccgatgcgcgctgcggcggccgcctggttgccggattttccgcccggcagcagctgcagcggaccgccggtgatggtctcccccggccctggcagacgctgtgcggtgacggtgtagtccgcgttcatcgagccgattacggacactgtgccgtggatgcggtccaatgcggagagaacttcagtcgcgctcatctttaccttccttacatcaaaagaagatttatgaaaatggagatttgcgaaatagtgttgttcagtaatcgcaattatcgcaaatccccatttttattatattgaggatgtaatgtgcgattactttgccgattcctcggtttccagcgcatggttgccttcgtagatcttcttcttgaagaagaagaacacgatcaggccaagcagtgcggtaccggcggcgaccagcagcaggttggcatagttggcggcagtgccggttgcgccggtgatggagccgcctgcgagggcgttggagccgagcaggctgccgatgatggcgatgccgatggacggggaaacgttcatggccagatcgttcatgccgacgccacggccggattcgtccttttcaatggtgcccagcacggtggagaccaccggggagtacatgaggccgcagcctgcgtagaacacacatgcgcacagggtcagcaccacgaaaccggagttcacgcagaatgccgcaccggtccagccgaggaacatgagggtgcctgcggtcacgatgccggccttgatgccgatcttgcggatgatcatgccggagcaggtgcccaccacggcggcgaccacgaaggcccacacaatgtgcagggagacctgggtggtggtcatgccgtagatgttggtgccgatggcgttgaagatcgggctcagtgcgtagttcacgaagtagaacacgaggatcaggcagatggcgcgcagccagcgggtgttcttgaagaaggccggggtgatgaacgggttggaggccttgttgatgtagaaggcgaatgccacgaacagcagcagggagaccacgagcatccaccatgccatgtacgagaagaacagggtgaggaatgcggtggcgaagccgaagatcacgaagccgaatgcgtcaaccttctggccattgccgctcttggacggcagggtcttgagcaggatcggcaggaacaggatggtgacggacgggatcaggaacaggaactgccatgcgatggagctgagcatgccggctgcgaacacgccgatggatgcggaaagctggtatgcggcggtgaacagaccgaagaagatgaccttcaaatcgttacgcaggtacttggtggccaccaccaggaaggcggaacctgccacctgttcgcctgcggtctgcagcacgcgtgcgatgatcacggtccacaggtttgcggcgaagaagtagtttgccacgaaaccgaagatggagccgacgaacagcgtcacgagaccgacggtcacaagcttacgcagggagacgaaatcgcccagggaaccgtagatgaagcacacgatgccgagcacgatgctcggaaatgcggtgatcagggacgcctggttcggtgcgccgacgtcggtgccgacctgctggaacaccaggttgaagccctgcaggcacagggtgccgagcacgaaggtgatcagcagcgggatcagggcgcggatggccatcttgttgctggtcaccggatcatcgaacggatcggcggatgcggtgccggtcacggcggttgtgttgttagacataataaaaatccttgattctctcgaattgcgcgatatgcgatacgcgattgcttggccggttacgcttattcagccttggctgcgaggccggagatgcgggtcatgaattcgttcaggaagcgcggcacgtcgacgccgacggcaaccttcatggtcttggccgggtcattcaggcgggtttcgtcgccgatggtgcgtccgcgggtcgggccttccacgtcgaccttcatattgatgtcgagggtggtgacgagggtcgggtccactgccacgccaacggcgagcggatcgtgcaggccgcagccgcccagatgcggggacgtggtttcgtaagccttgatgtagaagtcggtcatgtcggccaggaacttgccggccttggtgccgaggtcgcgccactgctgggtttccttgtaggtgagcagggtctgcagggttacgtcgagaccgatcatggtggtcggcgccccggaacggaacaggtagtcggcggcttccggatcctgcgaaatgttggcttccatgcaggcgttgcagttgccgggtacggtcagtgcgccgcccataagcacgatttggccgatttcatccttgatttccggtgctttcttcagtgcggcttcgatgttggtcatcgggccggtcggcacgtagacgagatccttgccataagtcttcactgcgtcgatgatgaagtcgaccgcagattcggtttcgacggaacggctggaatcggggatttccacatcgccgatgccgttgtcgccgtggatgaacgcggagattggcagtacttcgaaatggtcggtggtgctggagtgcggcaaaccctgatacaccttgacttccgggtggccgagcaggtcggtcacggccagtgcgttgcgcacaccctgctcgacgagcacgttgccgtaggtgccggtgatgccgatcagttcaatctccgggcttcccagagcatacgaaatggcaagcgcgtcatcaacgccggtatcaagatcaagaatcatctttttcatgtgtgtgcctttcctctttgacggcctgacgacggtccgccaccatacgggtgcgtcgtcagttatacatcgagcgcattctcgattgtgttgtgttgacaagatttatgataaagcgttttatcaagaacgcaaattcttcacctatacacggcgtgttgcctgtattcccaacgattacagcatattggagatgcttacgtcaccacataccgagattgatctgcaccacccgttttgcaccagtctgcagcatctaaaaatggcggtttacgcgcaggccgcctgcaccagtttcggcgtaagcacttcaacctgcggatcggaaagccacggacgggcatcccctgattccgtaccggacttggcacgaaccgcaacatcaatccgcttacgcaacataccccaacaagcggcggccaaatcagtcacgctctgctcaacggtggtcatacgccaaccaagaccgaatcgtttgagaatattgtcgtaaccaatcacctgcatatcctcagtaacatgcaacccacgctccgccatacgctgacggaagccaagcgccatcacatcgttgcagcagaacacggccgtcgccccgccatcgatgatctgattcgcggcacgatagccgctatcgaaacggtaatcaccctcaacacacagcgacgaatcaaaatgcttccccgactgctcgatggcatccacaaaaccacgacgacgctccgcggcactcgactccgcaatatcgccggtgacaatgccaatacgagtatgaccaccttccaccagatactgggcagccaaacgaccgccaagataattgtcaaaaccaacggcatcgcaccaaccgcactgcgtcaaacgatcaatcaacaccacagggcacgacacaagcgccacatccccacgcaaccgctcagcagcatcgccagcgcaggactcgcgcgccggaatcagcatcacaccgtccaccccacgagccggaaggcgctgcaacaactcatgctcggtaacacgcgaatcatcggaattggccacaatcagcgaatacccctgcgcggcgcactcatcctccacacacttggcaagcgccgcgaaaaacaagttctcaatatcaggcacgatcagcgcaaccagctgggactgcttggtcaccaagctacgcgcgctctgattcggcacgtaattcagcttcttcgccgcgtcggcaatggccttgcgcttctcctcagacacgcgagccggtcgattattcaacaccagagaaaccgtcgtcacagacacccccgcggcagcggccacatccttcagtgtcgcacgatacgccatccaaacccccttaaaacgtttctccctccagcataaatgccatgcgatcctgacgcgcccagcatcgcaatcacaaacaaattcctttcacagcaaaataatccgcactatttacagcggtaaatcgtttttcggaagtgttttttgtatactcacaacgttttatctgaaatgagagccacacgagaagagaggaaccaccatgcagccaaccatgcagaaaaacaatgtgaaacagcgcaagaccatcgccatgatcgccatgatcgcagtagctgccatcgcgctcgcagccgtcgccatcatcgcagtctccaacaagcgcgaaatgacacaagccgccagcgacacctgcgcgttgaatgcgaaagcgctcgccacgcatcagcagagctttgaagaagcgcaacaagaagctgaagaagcagcgaaactcaccgtaaatgacgtggcggacggcaccacgctcgaaaccctgaaggatgcgatcacactggccaaagccatggaaagcgcgccagcatgccccgcaagcggcaatgccagcgacttcaccaaagcgacggacgacattcgcaaatacgccgacaacctgcgcaacatcactaacgaactcgacgcggccgccaagtcggtggtcgccagccaagaactcagactcgagtccgccgagtaagtcaggtaagccgccccgacggttagcgccaacgtcagcgccaaaccctacgtttaacggggccaaagtcatccaagtctgcaacttcgcccccattacaagcgctttcgcatcgtatctggcttatatatggcagattcggaaggtcgcccggagacatttcgcttatatatggcaggtcattccggaaagaccgcagttagagggtgcaaaattaccccctaactagcttgtttcaaaaacagactgccatatataagcgaaacgcatccgtacaaaccccaaaatctgccatacataagcgagataccatctgccgactttcctttattttgcattatgcgtgcatttgacatagaatacacattaattgcacgcaagattagggcaggtgattcagatgggcaatattaccattcgcatgaacgacgatctgaaagctcgggtcaaccagacactcgacgccataggcatgaatttcaacacttacgtgaccatggcgagcatccagctcgtgaaccagcagcgcctgcctttcgacacttccgcgcgcgccgcggaaccaaacgagcagaccaagcgcgccatgctcgaagccgaagccaaggaacgcggtatcctcccagacgacgcggccaccttcaacagcgcgcaagacgccatcgcctggctgcacaacaatcacggctgaacaggcaaagcgccatgattaccattaaattcgaccaacaatttcagaccgacttcaaacgcatctcacgacggatacctcaaatcgtaacggaactcgaatatgtaatcgaagctattgaggagtacgggcacgttccggaatcatataattctcacatgcttgatcacccacgaggaatctactcgggatatgcggaattccatcttgccgaggggaaaatggatgtgttggtgatctactcggagcggccggaagcgtcgacaatccgattcattcgcatgggatcccacgacgaactgtttgacggtccgttgctttagatgagaccatcgtaggacccaacgagattcagccatcgatttccgcccaataaaactttttcccaccatatcgggcttatatatggcagattcgacagcccgacttgaggtttttcgcttatatatggcaggtcattccggaaagaccgcagttagagggtgcaaaattaccccctaactagcttgtttcaaaaacagactgccatacataggcgaaatgcctccgtacaaaccccaaaatctgccacacataagcgagatatgcccatgaattacgcatctatgctgtgcaggcgcgacctcgcgtcgcttagaggcttgacaacaccttccatttgacaaaagttgtcagttgccacgcaccaggagacgcaataggggccgcacctccgaggtgcggccgtttttcacccttcaccaaacctggatctgcaactaaggctagcgaacaaaatgtacgccaaaccacacatccattccccggcgaggttgactcgcctgcaacgcgtctcctcgatcaccgcttaccgaacttcaattgtccggctcgcgccacacgaaccgaattcttactggccttgggcgcggtagcgggcttcggtggcggctttggcgggctcccaccaggcacggttgtccgtataccaagcgatggtcgcttgcaaaccggcttcgaaatcggtgtgcacaggcttccattcgagttcggtacgcagcttactagagtcaatcgcataacgccgatcatgcccgggacggtcacgcacccagtcgaacgcatcttcggcacatcccataagccgcagaatcatacgcattacagcaatattgctcatttcgccatctgcgccaatcaggtacgtttcgccgatccgcccgcgtgtaagaatcttccacaccgcagaagagtggtcttccgtatggatccagtcacgcacgttctcaccagtgccatacagtttcggccgcacaccctccatgatggatgtgacctgccgcggaatgaacttttccacatgctggtatggcccataattgttggaacagttggaaatcgtggcgcgtagaccgtacgtgcgcacccatgcgcgcaccagctggtcggatgccgctttcgacgcactgtacggactcgacggcttgtatggcgtactttcggtgaatttgcgtggatcgtcgagtgcaaggtcgccgtacacttcgtcggtgctgatgtggtggaatcgtacgtcatacttacgggcggcttcaagcaaatggaacgtaccctccacatttgttgtaatgaagggttcgggattggcaatggaattgtcgttgtgtgattcggctgcgaaatgcacgatcgcgtcatgatccggtacgatacgttccagtaatgcaacatcgcaaatgtcgccttgcacaagttcgacttgcgattgcggaagaccggcgatattttgcggatttccggcataggtcagtttgtcgagcacggttatgtgcacgtcaggatggttacgtaccacatagcgcacgaaattggctccgataaacccacatccgccggtcacgatgatgttgcgcggcttgaaaatctcactactcactatttcagggtaccggcagggttgcatagccataaagcgattccacaaactggcttatatatggcagattcggcagcccaaccggtggtatctcagttacccttgatttggtgtataaatagcacttcacctacccttgatttggtgtataattgagcatggtattacccttgatttggtgtatttacggcggtgagacatggagactttcgaacgaaaagcgtacgaaaaactggcttcctggaaggattcttcccaaggaagcacagccctgctcatcgagggcgcacgacgcgtcgggaaaagcaccatcgcggaggaattcggacgacggaactatgcgtcgtatatgctcgtcgacttctcgaaagcccctgatgacgtgctggactacttcgtcgacctgcgcaacgacctcgacgcgttcttcatgtacctgtcatccttctacggagtggaactgcacaggagggatagcctcatcattttcgacgaggtgcaactgtatccgaaggcccgcgaggccatcaagcagctggtggctgacgggcgttacgactacatcgagacgaggtcgcttgtctccatccgcgaaaacgtcaaggacatcctcattccatcagaggaggagtcgatccacctgaatcccatggatttcgatgaattcctctgggctttgggagaaaagccactgtccacgctcatcgcagactcgttcaagaagcgcaggccgctccccgattcgctgcacaggaaggccatgcggctattccgtgaatacatgctggtcggaggcatgccccaggctgtgtcgaagtacgtcgagactcatgatttcagcaaagtcgacaacgtcaaacggaacatcctccgactgtacaggcaagacatctccaaacatggcggcagcgaccggatacgcatcacgcgcatcttcgacaacctggtgggccagctttccaagaaagagaagaagttcaacatcacatcgctaggaaaggaagcgaagacccgcgattacgaggacgccttcttctggctttccgacgcgttcatcaccaacgactgtttcaattccactgatccgagcgtggggctaagcattagcgaggaccattcgacggtcaaatgctacgccgccgacaccggacttctcaccactctcgccctggccgactcggaacagaccggaagcaacctataccgggacatcctcctggaacacatcgaaatcaacgagggcatgctcgcggagaacgtcgtcgcacagcttctccgggccaacgggcaccggctgttcttttactcgcgcagcgatcgcgacgacccgtcgaaccgtatggagatcgacttcctcattgtcgaaccgtatgagaacgcggcgatgaagtacagggtcagccccatcgaggtcaagtcatcgaaacgctaccgcacggtctcgctggacaagttcaagacgaaattcgacaagaaggtcggcaccagatacgtgctgcatccgaaaccgctggtcgtggaaaatgatgtggtcaagctgccgatctacatggcaggactgctatagaaggcttcacgcagacagcgctttttagtgcactaccagcgaatgacgcccaacacttgcgagcgcatatgttgtccaccttgaacacatctgtttgctgcccgtcacccagttaaccttccagctacctttcagacatctacgagatacccgttcgtccacagctgaacactaaaatgtatccggtttaattgtacagagcccctaattataaggggctatcttgttgaaggatgcgacgatgcctattttttcgcctgaccgtcatgcttgtgcaccttcatacgtaaaacttactaagcagccgattacgggcggagcgtatcgccctcttgcgaatgacgaagatagcaacgcttgcgctccatccaccctttcaggtcgccatggttcaaagctgtatacgcagaaatcagcaattcacgccatctccgataacgcaagcgttttcattcccaaagtcgatgcgccccatctgccaaaaacgactgacgacaagtccattgacgaagccattaacgaagctgcgaacgacagtacccattcagcccccccgtctgctgaaattcaactcgcgcaagctaacgagcatcctctgatgcaggctatcgaggtctgcaaacaatccgtacacactacggcaaaagcactctccaccgcaggacatgcagttgcaaaagctgccaaaaccaccggccacgccatccataccgccgccacagcggtaaagaccgcatggcaaactttcaccaatttcaaagctattcaactcatcatcaagttcttccagaaggcgcacggcctgtggaagaaacgcatgaggttctcatacgcgttctacgccatcgtgttcaccctattgacttctgccgaggtcatcttccttcagtggggaatgtatagcgaaccaacgtacgataaaggcgatgaagttgatcagacaaccaaaattctgaacagcgtcgcagggcaagtcaccaaattcgtcagtcaaatgtatcttgaacaaaaataccaattcctgctcagtctgtttacactcgcagtgatttatcttgttttcatctttgtcaccaatcgtttttggattgcgacattattgttcggtattcttttcactgtctacggaacggccaacagcgttaagatgggactacgcaatgaaccaatcattcctgccgatctatcttttgtgacaggaggagattcaggaaaacttctgtctttcattcctaaagaaagtcagtcattcgtcaacggagccgccactgttttagtctggttcatttgctgctgtatcgttttcttcattatagatggtagacggagtttcatctattgctcatggaaaagaccttttgcaagcattaaaaactttactggcactcttacccgcattgttgccgcaatatccagtattgctttgctctgttcctactcttggaacctcagcgttcccggctcctgggcatactctttcgcgggatcgcttgggtatactccttccttattcgatactaaaattgacgcccagaccaatggtccggtcactacattcctcagcttggcaaaaacgaaagtgatagaaaaaccaaaagattataatcgcgatacaatgacgcaaattgcggaaaaatactctcagcaggccatatcaatcaacaacaacaggcagaatgaccttactgacagtactgtagtaatgattctttcggagactttttccgatccaacaagaattcctggtatttctttttcgactgatccgattccgaatattcatgctataaaagacaccacgacctcgggcttgatgttgtcttcggggtatggcggaggtaccgccaatatggaatatcaagctttgacgggtttaagtctgtctatttttgatgattccctcattatcccgttccaacagcttgtgcctaatcagaagaacccttatgccttcaaccaaatctggaacaatcgatatggcgctgacggctctgacgcagttcatccgtattaccaaagcatgtatctgagaaacgttgactacaagaaatttggcttttctcacctacgcactcttgatagcactccctcaatcaagcacaaagacacaatcgactactctccatacgtcagtgatgaagaggcatacaaaaatattattgatttaatcgaaaagcaaaagcacccacagtttttgcaattatccaccatgcaaaatcatatgccttacaccaattggtacatcgataatgaatttgtaggcgcagatacttccacaggattgtctgcggacgaatatcaaaatctcgaaacctatactaaaggactaaacctcaccgatcaggcaaccgcttcgttcttagacgaactcaaccaaattgacaagccaattactgtgattttctatggcgatcacctgcctagtatctattcgacagctgatcaggatactgaaaatcacgtcgctctacatgaaaccgactactttatatggtcaaacagtgcatcagcatcaagtggaacgaaactcgatgcctctaatacagccttcacgtcgccaaattacttcatgtcattagcagccaaccatatgaatgcgaaagtatctccttatcttgcattacttacacaattgttggaacaaattcccgtagcaagtcgcatcgcaacagaaacaggcggaatcagttcaggggacacaacgtatctggacatgtcaggcaatcagatctcgaagaaatcactgagtaaggacgcaaaacaactacttcgtgactatgaattggttcaatatgatatgaccgcaggcaaagggtatctaaacaacaccgatttcaccaaagtccaataaccttgtacgatagaaacgtacgactaacccatgcgtcaaggatgcacttcatgaccggtataagaccgttggtctcaattattgttcccgtgtataacgcagaaaaatatctgccatactgtatcgattcaattctggctcagtcataccaaaccttggaaatcatcctcgtcgatgatggcgctacggataagtcgccacaaatttgcgacagttatgcagctctggactctcgtgttcatgtcattcatcaagaaaatggtggcatcgctaaagctcagaacgctggcctcgatgccgcacacggtgaatatgtcgcttttgcggacaacgatgacattttggattgtcataacattgaattccttctgcatgctctcctaagcagcggctctgacatgtctaaggctcggtggcaacagtttggcatctcacagctcgataaggtcaaatcagttgcagcagtaggcgcaacggcacctaacaaagtaactgcattcaaaaacccacttcggtcgtatcaaactgttttctgcaagagtcttcgtctcatcggtgacatactcaaaaaaaataccgaagctcgttacttcaacgaggcgaactggtgccgcttatacaaacgagaattgtgggacggcattcgtttccccgaaggcatgtatgcccaagatgtcatggtagccggcaagttatactcccgcatgcataaagttgtggacatcgattgtactttgtactactggctccagtcccctggatccgtcactcacagcaagcgcaattacagtttttaccaggacaatctcaacgcggggctgtcaaatttcgagcatgctctcagccaaggcgtgcttccagcccgcagctactacaccatgatcggatcactaaacgaggcagcctccgcccccgatttaagctcaaatagaagcacttatgagcgtagcaagaacgaggctcaatctcttattaggaagctgtctctttcgcaaaaaacaatttgtgtaattctgcgtcatatgcggttagttgaaaaggctgtgtacgaccgcaaaattaaaaacatgcagtagcttgcttcccaaagcaatccaacgttatatgtggcatgtgcatagggtgtagattttaaacagcctaaagtttcagctatcccttttgatagagtggagagactatgagtgacttaattcggcgtttcaaggctaagtaccgatattcaatagtggtatttaaagaattagtgaagactgacttccagctaagatatcaaggatcttttctaggcgtactttggtctgtcttaaaaccgttgatgctttttgccgtcatgtacatggttttcgtccgattcctacgtttttcggacggtactcctacatttgcgatttcacttctgtgcggtacatgcttgtggtcattcttttctgaagcgaccactatgggaatgcagtcaatagttaatcgtggcgatttacttcgcaaggttcatttcccgagctatatcatcgttgccgcaacaaccatgggatctatgatttcccttggaataaacttgcttgtggttgtcatcttcggtttcttctcgcacgcccattacacatggtatatgctgctagttcctctgaacgtactgcagctttatgcgctggccctcgccatttcgttgcttctcggcacgttgtatgtatattttcgagatgtgtcccatatatgggatgtcgttttacaagcaatgttttatgcgattcctgtaatttatccactttctatggtttcgcagtacttccccgctgtgtccaaaattatgttactcaatccaatagcgcagaccatcatggatgtccgtcacaatctgttatctccagaggacattccaactgtatggacatgggtgggtgaccccattctttcccttatcccgtatgctctgacggcattattgctctggcttggtgtacatgttttccgaaagaatagcagcaaattcgcggaggtactctagtgactacagttgaaaccccgattgtcctgtcgaacgatgaagagaatcccctcgcgctatctgtttctcacgttgcaaaatcgttccgtctgccgacagaacaggcaagtggcctaaaacaagccttcctgaactggaccaaaggcatcaaaggataccgtgaacagcaagtgctgcgcgatatttctttcgaagtacgaaaaggtgatttctttggtatcgtcggacgaaacggctctggaaaatcaaccctcctcaagattatttcaggtatctatacacccgaaaaaggcaacgttgtgataaatggaactctagtcccgtttatcgaattaggtgtcggttttaatccagaattaacgggtagagaaaatgtgtacctcaatggcgcactcctcggtttctctcgcgaccaagtcgacgcaatgtatgacgatatcgttgaatttgctgagcttggtgaattcatggatcagaaacttaaaaactattctagcggcatgcaggtgcgtcttgctttctctgtggctatcaaagcgcgcggagacattctagttctagatgaagtgcttgcggttggagacgaggctttccagaagaagtgcgataggttctttaagcaggtcaaaaccgatccaagcaagacagttatacttgtcacgcatagcatggatgccgtcaagaagtattgcaataaggcaattctcattaaagacggtgaaattattgcctctggtgacccacataatgtcgcagatcagtattcgctcgagaatgcacatgaactcaactattacaagacaaagaacgactcgagcaaggagcttcgctatcccaatggtctgaaccagcgcgttcccgtgcttcgaataactcctgtcagccctaaaatcgtcgatggggaatctccctttgtttttgacgttgaatatgaatacgccattagtgatcgacagggatatctggggctaattctgcaagatgcacgacgcggtggccaaatttatgacgtcgatactcaaagcgaatatttcggtctcccaattgaaaaagggcaccataaagtccggttttccattccaatggagcaattcaataacggggagttccgcattttcgccaccatccgttctgagtcagaggaatcagaacggccagattacgtcgctttcaccaacgatgatttctgctgctattttgcagtgcgcaatgatagaaacagcgaaaacggtatcctcagtgaccgcgcgttgacttttaatcgcatcgactagtcaagttttacgagaaggacgactttcaaaaaattgacaggtctttagaaagcgacagcgagtcattgctgtaagtaattatgaccagataaataactgcagcaacctgtccaggtcgtgatacgtattatcaatacacacagagagagcaaactactatgaaaattcaagatgagtcatcggtaaaacgtcttgggattttcttcttctacgatgcagaaggcgtggtagatgactacatccctacattgctgaatggtttcagaccctatctttctgaaatgactatcgtctgcaatggaaaattgaacgaggcaggagaaaaaattctttcctcgtatacaaataacctgattgttcgcccaaatgagggtttcgatgtttgggcttataaaactgcaatggaatcttacggttgggaaaaactcgtatctttcgatgaagttgtgctgttcaacgccaccatcatgggtcctgtctatccgttctctgaaatgtttgagacgatggatcagcgtgatttggacttctggggtatcacaaagttccataaagttccacaggacccattcgggcgcagtccctttggatatctaccagagcatattcaatcccacttccacgcataccgtcgaagcctgattgagagcaagtcattccaagactattgggacaatatgcctcctattaaaagctactatgattctgttggcctccatgagtcattgtttactaaacgttttgctgacaagggatttaagtgggacacctacgtcaatacggatgatttagaaggctttacatacggaccgattacttttgccgcgaagacactagtcgcagaaaagcgttgccctattttcaaacgtcgctcattcttccatgactacatggataccatgaatcagtccgtaggcaatgccgcgttggacttgtttgaattcctacgtgatcatactgactttgatgttgatctcatttggcaaaatgcactgagaaccatgaatctcgcagatcttgtcaaaaacctgcatcttgattttgttcttcccacaaatactatcgctcccattccgactaataagcgtattgctcttatcatgcatttgtactatatggatttgctcgataagactctggaatacgctaaatccatgccggaaggttgcgatttcattttcaccgttggctctgaggagaacgctacgattgtgcgagagcgttgcaaagatctgccctataacgttgatgtgcgtgttattcagaatcgcggacgtgacgtcagcgcattattggttggagcaggcaaagactgccttcaatacgattacgtatgcttcgcacatgacaaaaaagttacccaactttctccatacagcataggtgatggcttcgcttataagtgcttcgagaatgtattaggaagtaaggctctggtcagcaatataatcaatcatttcgagaatgatccgcatgctggcgttcttgcacctgcgccgccgaaccatgctgattactttggtaatttcgccagtctttggggaccaaattacgaaggtaccaaaaaaatgcttgaaaaaacactacgggttaaggttccactggataaggataaagaacctattgctcccatgggaacgatgttctggttccgtccaaaagctttgcaacagttcttcgacatcgactggaagtatgaggacttccctcctgagccgaataaaatcgacggttccatgcttcattttgttgaacgagcttacggttatgttcctcaagctaacggctactacacaggctatatctattctgaccgttttgcgcgtatcgagatcactaacctctcttatgatatccaaaagctagccaattgtgccgctccctatcttgatgcgactttacttggaacttgtacaaatgtaccccgtggcttctctttaagagctgccattcttctatggttcaagcgtatgctggtaaaagtgccctttgcctatcattgcggtgcaaaattcatgaacttgtatagacatatccgtcacccgcgcacatacaaaacccgatatggaaacgccaacagccatctgaagaaagaccgtacatgacagacaatagtctcaccgctaagaaagctgaggacgtagcccagcagagcaagaaaaaacgtccacgacttttctatttggatttggtgcgtgcgctagctgcaatccttattgttatcacgcatttcaacaatccttatatgctcggccatccagttttcatgtatgaaccatttggcatttatgtaggcagtctaggtgtatcgctgttcctcatcatttcaggagcagcgcttatgtacacatatggcgaatccgacaaactagactgcaggcatttctattacaagcgcttcattggaatctatccaatgttctggattgcatttatccttgcgaatgcttttctcttccttcgtaacggaggacacgtacttgcttccgcaccgaaatggtcattaatcttttcggtacttggcatcgatggcatggtcgcgaacacctcgttcccgactttttatacgctaggtgaatggtttttagggttcatcctcatctattatgcgctattccctctgttgcgctgtggagttaagaagcacccgattataacagtcattatcgctcttgcactttatgcagctactttgatccttcagccaacaatatttggtttgccttcggatctgctcatgactacgcgactgccagaattactgtttggcatgtatttcatccagtacatacaaaaagtaccaacggtcgcaggagctggagctcttctagtgcttatcatacaagagcttcatcctttgctaaaaggttcttttgccgtgactgtagtaggaatcggtgcattcctagtcatcgtttatgcagcaaaatggcttgatgtgcaacccgtacgtgtaccagtaaagtccatcgcgaaatactcgtatccaattttcctggtacatcacgtcttgattgcccaagtcttcacaatcgttgattgcaccgctctgtcaccttttgacggatatctacttttctttgcagatttcttaataatcatggcattagcagttggactctttaaacttgagaaagcgacagtccaatacgtgcgttcgatgttcgcaacaggaaacagaagatgactttattctaaattgtcctcgtctgtttccttgattatatatataggcctatgttttacttcagtgtaggttttggccagatattctcccacgatgccgatgcaaaaaagttgcaacccaccgatcaggagaataatgctaatcatgcttggccatcctgcaacaggatcgccaaagagtaatgccctcaggacaacaataatgatgcctatgaatgcagcatcacagcagaaaacacctaaaaatgaagcaaaggcaagaggaaccgttgaaaaacctgcaataccctcaatggaatatctaaacaatgaccagaaattccatttggtctttccagcgactcgttctatattcttataggaaatccaatgagtcttaaagccaacccacgaaaaaatacccttagaaaaacgattatattcagttaaatcaagaatagcatcaacaaattttcttgtcataaaacggaaatctcgagcaccgtccataatctccgtaccagacaatttattaatgattttatagaataatttagcaaaaagactgcggactaaaggctcgcccttacgtgtttctctgcgcgtagcgacacaatcgtattctttattttctataaggaatctcaacatttcaggcataagagacggaggatcctgcagatccgcatccaatgttgctacataatcgccttcagcatttttcaagccagcatacaagccagcttccttaccgaaattacgggagaaagagataaaccgaacacgatcatccttcttccgcaattttcggagttccttgacagttccatcggatgagccatcatcgataaagataaactcagcctcggcttgatattctttacgcagaatatcggagacatgacaagcttctttataaaaaatcggcaacgactcttcttcgttgtagcagggaacaacaaaactgacaagcatcacgcataatccttattaatacttttaacccggaacatggccacatgaataagtcaaaaattgactattacaaaatcatccttctgtgcaacactccctttagctggccaatgaggcatcgaacgtcccacctccgtcgctttttcaatctgctcggtagaagcttgtgcaaaatttgttcccgtaatatttaagaaattcgtcttaacaaacgttccttgttcgggggaaacggtcacttcaaacaaagatcgtcccaccaaacccaactggtccgaggtatagcagtctttattacaagcggacttatgataattcaggaatactagagacacctcagactgatcgtcgatattcagctcatcgattcgcgttctaatctcctgcgccagttccatatcctgctgatgattggtggcttccgtataaaagatacgattcacgatgagtgcttgactccatccaattgccagcaccgagaagatcgcaagccactttacacaacgttccttagtgaatgaaacagatgcccataccgccaagaaagataacacaaatgagaatgccaacggatacgacatctcagtccgagtggaaggattgcctcctaaaacaacgctcatcatcatcggagaggcgcacacacacaatgcgacaatgaacatcaaaacatcagcatgttttcgggatacagcaatccccatcactgccaagaaaatacccagcacaattgggaacgcaacggaataatatatcccctctcctgaatacaacgtcacagcatggctcaaaatagcatgcgcaatttcgtgaatagatcccttaccccaacttgattgatcgctaatgtatgcgtttgtcgtcacatgatacatcttcattgcagcagcattagcgactttgtagaaagcataagcaaaaacaaaaataccagcagcgacaaaaatgaaaacaaaacgacgtaataaatcatgctcacggtcatcccaaaaaagcacgagaaaaaccatggcaaccccagtgataaacacagttaccatcgccaagtacaaggtaaatgcagcaaaagccgtcagacacgacaatactgcaacccaccattttttgctaaaccaactgtttagcagcagcatcaaggaacatgctacaagtcccagtgcgatgccaatctctgcccctgttagagtaaaacctaccatctccgccaaaataggcgatgcgacaaatggcactgtaaagaaagccggatggaacttgcctttaagatttgaggctcccgcaagcaagtaggcccataacagcgctgccagtagaagacacatggccgtcaaaaaagaagcaaccgcattgttataccaatacagtcccaataccttctttaaagcgagaaggccgaaacgctcaagccctacccaagacctatacagattctccggcacctgcatcatggcctccgtgtcgatggaatacgagttaccaaacatcttcaattcgtatcccataaacaggaaaaacacactcagcaccatgtcccaaggatttccttgcaggtacttcataaaacctctgagagaatatttgtctctcagaggaatggaaggtctcttcacttcagaaacgctgaccgtctctgaatcttcaatactagaagtttcgacacttatagcttcaacacttgccattattattttagctagttccaatcacacctattgcggttcagttacctagaatctgccgaattttagtcgcgtcgccccacacacccggagagtcatacggtcgatccgggaatgcgccgtactcaagcttaatgttgaggccattctccttgatgtaacgttccactcgttcagccaaagtaagtggctcacctgtgcagcaattgataatcccgttaacctgatcctgagaaacaacagcactaatctgacgtgcaagctcatccacatcaatgaaatcgtacttgttctttcctgtagtaaacgggaatgttggcttaccctcattagcagcctgaagcagttttgaaaaaatggaacttccatgtgcatcgtcgccgacaatataatacgcacgaatccactgaaccgtcgcatctttttccttagcaagcattagagtcgcctctcggagagcgttcttagcgatgccatacatagatgccggatggcagggagtactttcatcaatggcgccctcccagtagccgacttcgtgcatcgtgcccatgaccgcaatctgctttagccccgcatccagcatggtcttaatgaacctgtagtggctggaaagatctcccatatgattgtctgaattgtgcttaaaaccgtcacgccaagccatgtgcaagcacacatcaggagaaccaagttcctcaaacagcgaatcatttggtccaaaaatgtttgcctgaatctttgttgccctgtcgtcaataccatcaactcggaggtcagaagctacaacttccagtccggaatccaataatgccttcaccacatggcggccgatgtatccgccagcacccgtaaccaaaattttcttagccataaacaccgagtttaccagcagcagttcccctacaccaaggcgtgaaaagacccaacggaaatttcacgtttcactcggctttcgtacgtgttggcagctactattaagtgtatggctgaagagacgtttactcctaagaacatcatcgtgaccggtggctgtggtttcatcgggtcgaatttcgtgcattatgtggtcgacaaccatccgcatgtgcacgtgaccgtgttggacgctttgacctacgcgggcaacatcgagaacatcgcgggccttcccgaggatcgtgtcgagttcgtacacggcaacatctgcgacgcggaactgctcgacaggattgtgccgggccacgacgcgatcgtgcattatgcggccgagtcccacaacgacaattcgatcgcggatccggaaccgttcctgaagacgaacgtagagggcacgttccgcctgctcgaggccgtgcgcaagtacggcatccgctaccaccacgtgagcacggacgaggtgtatggcgacctcgctttggatgatccggccaagttcacggagtccaccccgtaccatccgtccagcccgtactcgagcacgaaggccgcgtccgacatgctggtgcgcgcgtggacccgcacgtacggcctgaggaccactatttccaactgctcgaacaactacggcccgtaccagcatgtggagaagttcatcccccgccagatcacgaacatcctcgagggcgagaggccgaagctgtacggcaagggcgagaacgtacgcgactggatccacaccgaggaccattccagcggcgtgtggacgatcctgaccaagggaaggatcggcgagacctacctgatcggcgcgaacggcgagaggaacaacatcaccgtgcttcgcatgattctgaagatgatgggacagagcgaggacgcgttcgactgggtgaaggaccgtccgggccacgaccgtcgatacgcgatcgattccacgaaactgcggaccgagttgggttggacgcccacgcacacggacttcgagtccggactgaaacagaccatcgactggtacacggacaaccgctcctggtgggagccggccaaggccgccactgaagccaggtacaagcagcagggccagtaagacacatacgagaacggtcacaccccaaagggcgtggtcccatgatgattcccatctacggcaaaggatttacgagggtatggatttcgagaaggatttgagggtcgaggagacgaacgttccgggactgctggtgttcgacctgccggtgcacggcgacaaccgtggctggttcaaggagaactggcagcgggcgaagatgaccgagctcggcctgccggatttcggtccggtgcagaacaacatcagcttcaatgcgaagaagggcgtgacgcgaggcatccacgcggaaccgtgggacaagtacatctcgatcgccacgggctccgtgttcggcgcgtgggtggacctgcgtccgggcgaatccttcggccaggtgtacacgaccgtattggatccatcgaaggcgatctatgtgccgcgtggcgtgggcaacagcttccaggctttggaggacggcaccgcgtacacgtatctcgtgaacgcgcattggagcctcgagcagaagaagacctacaccttcgtgaacctcgcggacccggagctgaacatccagtggccgatcccgctggaggagtccgaacgcagcgaggccgacctgaagcacccgatgctgagggacgcgaagccgatggcgcctaagcgcacaatggtttttggatgcaacggcaaactcggcaaggcaatcaggcaatatgccgaagatcatcatctcgaaggttttgaatatcacgacacagacaccttcgacatctccgatgcgcatgcttttgaaaatgtggattgggatttgtacggcaccattatcaatgccgcagccttcactgccgtcgatgctgccgaaacagcagagggacgaaaagcggcatggttgacaaatgttcaaggcgtaaagaaccttgctaaagtcgctacagatcacaaaatcaccttggttcatatttccagtgattacgtattcgatggcgaacttgaattccacaaagaagacgaaggcttcgcgccactgggggtctacggacagaccaaggccgcgggtgatgcacttgtggaaaatgttcctcagcattatctcttgcgttctagctgggttatcggtgaagggcgcaactttgtaacccgcatgctaggtcttgcgcaatcaggcgaacctgcagaagcgccacgagatcaattcgggcgtttgactttcacctttgatatggcaaatgctattttccatctcctgacgacccatgctgaatacggtacttataacatgactggatccggcaaagttgctagctggtacgatatcgcaaagattgtttacgagaccgcagaagctgatatatctgcgcttaaggcaaattccgtcgaagaatatgttcagaacactcacggtgcacttcgcccacgcaattgttctctggatctaagcaaattggaatccaccggatatgcaccggttgactgggaagaggctctccacgactacctccagaaggagattgcaaaatgaaaggcatcattcttgctggaggatccggcacgaggctttatcctctaacaaccgtcacttcaaagcagcttctaccggtttatgacaagccgatgatctattacccgctcagcgtgttgatgatggctggaattcgtgacattttgatcatcagcactccgaaagatctaccgaactttgaacgacttttgggagacggtagccagtatggagtcaatttcagttacaaggttcagccgtctccggatggtctggcacaagctttcatcatcggagaagattttatcggaggcgaaccctgcgcacttgttcttggagataatatcttctatggaaatggtcttggcaaaaccttgagaagagccgcctccgtcaaacacggcgctactgttttcgggtattacgttgatgatcctgaacgttacggtgttgtcgagttcgacagtaaccataaagcgatatcgatagtagaaaagcccgaacatcctgctagcaattatgctgttacgggtctttatttttacgatgcacgagtcagcgagttcgccaagcaggtaaagccttctcctcgcggagaactcgaaattactgatttgaacaagatgtatctagaagataatagcttaaacgtccaaaccttgggacgaggctatgcttggcttgatacgggaacaatggattctctgtttgaagctggagaattcgtgcgaacaattcagcatgctcagggtcttccgattgcagtcgcagaagaaatcgcatttgaaaatggctggatctcagcagagcaacttatggaagctgcaataaagtatgggaaatccccatatggaaagcatcttaaagatgtcgcagatcataaaattatatcccgtccaaacgatgatccacaaataactgaataatataaaaaatagatcgctgtttcacgaagctcatgaaacagcgatcttttttatcagcctaataactagcccaatgagtcgtcaaactccaaaggcataggtcttagtctctactaacttcccatttgacgtatacaactcaaagtgagtccaatatatccctttactaggtttttcccaaacagcccactgaccgttaaaaccggcgacccattgttgcttgtttacgtcgtatatcttaatcttgtaacgtccttgagcattatcagaggatactcccagcaaaacatcttttgactgccatcccgcgtaagtagcattaatccgcttgctgcccggaacatatgcaaatgcgatggtcttttcaccaacacttgtcttggaagccgcatcgcgcacttcaagatgcaaccaatatgttccaacatcatcagaccaaccggcccaatttgcactattccaattggcgatggtcttccatttgcccgtattaacattgtacgactgccacttgtattcaagatcagtgtacggagcattcacagatgctccaactgcgatatcttcatctcttacgacccatagcagattaattaaggattcatactccttattcccaaacgcattcatgtccacattgccgctgatgccgtccaccttgccggtgctggtgtactgccatccgcgactgttggtcgggaatgagtcgaatcccatgcgagcgccgtactgcgccacccacgtggttttggcgtaaatgtcggcatgtttcagcggcccttgcaggtagctggtgtacgagtagacgcccagattcttgtatccggcggactgtagtgcgctgtaccagttgttgacgatattgttgtacacgttcggatcggtgggtggctgatgcccctcccaggtccacttttccaggtcgtagtacacggggtacgccaagtcgctcggattcacaccgaattgcttgagtttggcgaccacgtcggcaccttcttctttggcgagcgccggcgtgtccgcgtaggaataccagtagatgccgaacgggatgccaagccgcttgcattcggaaatgttgcgttgcgctttcttgtcggcattgttgccttcgccgtagccgaggcggatgatcacgccttccacgccgtcggctttcgctttggcccagtcgatgtcgccttgccatccggaaacgtcgatcacgcctttggcttgctgcacgaacaggttgttctgataatcgaagaaggctttcgtattgttgtaagtgccccagtgcgcgccgtattcattgctttcgaatttggagagctgtacgttcgcgtcggctacagcatttttgacatcttccgcacttaccggaatgaaggattcgccgttagttttggcgagcggatccggctgctgatcatgcgtaccgaccagcgtcgcatcggttacggtttcgccggtttcaatatttttgacctcaccttcggaggtgacggccagatcttccgaaaccacggtggcatcgtcggaaatctcgtcactgacggtgtccggaagtttcgcattcggattgtcaggcatgctgtcttgcgattgttggtcgcccgtctgatcatccgactgatcgtcagactgcataacaacgccattatctgcagtaacggaaccgctttgcgcaacagcatcctcaatcgcaatatcctgcaatgcgtaagccggcgcaaccgcaacggaagccgccaacgcaaccgcagacagcgcagtcgcaatcttcacaacatgatgtggcgaaaccattcgtcagcctctcttgaatacagtcatcaaccccaaatattcggcgcaaacgccctaatcgtcaactctaaccgcaccccgcaaccccgtccatccccaactccaaaatcatcccaatccccacatctcacgcattacacactgataagaatcgactagctcgttaggggcaccgatatggcatcatccatttccatatctcctttccagcattctcgctgaccttcccatcacgcttcgtagagggaccatttccaggaggggagtacgtggatcgtgccagtggaatcgggaagttcaatggtttctccctcgttaagcgtgagaatcaggccggaatcaacgttggtacgttgcataaccgcttgcagagagccgatttctcgcgccctggttttctcatttcccatattggcacacacttgaataagcccatacggttccgtagcaagagcatcgccgataagaaagtcaactttctcctgtttggacgtcggcatagtgtacgaagtgattgtttccgtacgcctaccggaagttcgtctctgcagttcgcagaaaatcgcagtttccagtcgttttccaatatcttgctggttggcacgtgacaccgcgtaaaccataccctgatcgacggcatacattttcggtaccgcagtactacccggcttgagcatggtggaatactcctcaagctgatacaccagaaatgcctgcttgaacagctcgagtaacgtattcgccttatcccaatagattttccagccgaccgctcgcaacgtttccacaagaccattggtagacagctcgcaagccgtattgcgcagcaaaaacagcgctatctgcgtggcgagagtaatgttttcacgaccaagacgctcggcaacgtcacgcgcaaccacgtcccgcacgtaaccttggagcgtttcaatacgatcagcttcaaccatacgttgcactgcagggaagccgccaatagttaggtaatcgttgtaggcagcttcaaaccgggtgacctctcgcggcgaaaacacggcatcggcaagagtgctgcccgctgtaggcgtttcgattccccgaaagtcgcagaattcacggaaagacagtggcgccatggcatgcggatgcgatcttcctcggaaattcgttgcgatttcttcgctggacagtttcgaagacgatccagtaatgactagcgtcacagcttcatgttcggctatgcgctggcagaatccctgccaattggcgcattcttgcacttcgtcaaggaagaggtagcagccatggtcacgagagtcgggatattgccgccagtattccgtaacaatatcgttgagcacggtgtcttgcattggttgcagacgatcgtcagcgaagttgaaatagaaaatatcattacgcgagacgccgttttgtaacaaatcatgaattttctggaaaagatagaacgttttgccgcaacgtcggatgccagtgatgatgtgcacagcattgaacactgccggctgcggcagctcgcgtatgatttcgatgcggcgtgacggcgtaggaatgtcaaactgcatggactcacgaaccagcatggcatacgattcacatggattatccggcaccataagttcttcctttcgccgtccgttgcgaaacacccaacaatcccagcataacacttctcaaaaattttaagaagtttccaccaacacttctcaaaatttttaagaagttaccacagacgaataaaactccagagaatacctgaatgcattaacgactacaacacgagtgtgggaaatcggggaaggacgggtatcgtacgctgtatattggcatttcaggtggactctcggaacgtgattcaattgacctgaatcgggagctgtcaccggggagtgcagaatagtaggcagattctggaggggttatggcacggcacggcaagaagccaagcgaggaaagtacctcgtcacacacaccgagaacacttgccggaagcgcaacgaccaacacttctgccgacagcactgacgccgctgccagcggtatcgcagtcaacagctcgaccgtcagcagcgcatttgccagcgatgccgatggcaataccgggaatacgcttgtcggcaacgcttccaacgaagtcgaagcaaccgaagtcgaaaccaacgcaaccagtaccaacgcaaccggagagcgcacaatcagcagcagcaacacggctgaaaccagcaaccggcaatcacacgaatccagcgaatcccgccagccgcacgacctattcgacgcggccatagcgcaaggcatcagcgacggcgacgcttggacgggccagcgcgtaaagcacatctaccgccagatcatcatcgccgtagtcgtcgtagtcgttgttctgggcgcggtcttcggattcacaggcgtgcgcgcatcgcagcaaatgcgcgacctggccgcactcaacgactgcaaggaagccgtcacggccatgaacacctcctattccaaggcgttccagctgaaggcgaagatctccgaagcgttcaccagcttcgacgggtcctacgatctcgacaagcttgccgaactgcaccagacggaagttaccgcgccgaaaacgctgagctgcgccgccgacacttccgctaccatcagcaaagccaacgccgcaaaagccgagtacgacaagcaggccaagcagttcaagcaggccctgcagaaggccgacgaatccacggccaccgatggcggtgacggaactgacggaacggccagtggcaataacagcaccaatggcacggaaggtactgatttcccaaatcaaaggtaagcagattgtgctgagtgccgctgatggaagttcgaatcttaacacggtaactcaagtgcgttattggtggagcggaaatccggctatttccagtctgctctataacgatcttgaattgccagcaagtccgtttattacggttgttgagtaggattcgcagccttataacgttggtcgacgtagtgcggggcgctggatgccatgcggggcgtaataccgttattgccgttgtcatcgtcattaccgtctgcattggaatcttgcgatttacgaagcgatcctgcagccaatgaacgtatggatcgaacggaacggccaagctgcgactgcttttcctgctcgtccgactggattgcaggaaacgcaccggtcacggggcgaacacgcccggtcgcagtgggaatgaagcttggcggcagcacttgcgtggtaatggcactcggcgatgatgcatgatagcgggccatcgaagccagggaatcgcgggtatcgagctcacgccgaatatctagctcatcgtcggactcagccatcgcagcacttcctctcttccggcgctctcagccgacaatctctccactggtaactgtcaccgttttgagcgtaacgcaaggcagtatgctactgcgaacgaaatcagcgatatgtgcaactcccccactgtttcgcaactttttcgtcgcacatctacgcaacaggccattgtaaaatcgccgtttttggtatgaaaaaagggcttccggaatcatccgaaaaccctactggcggagaatacgagattccggcagcgacttgctgttttcggtgtaattccaacgtttctaggctgccgattaagtgtttcgccgcttaactcgtcgcccctacggcgtgtcgcgatggggtgaaacgggtggttatgaacgggtgcgttttggattgcgcgaaacaggggagagtattgaggatgctttttccatgaagagcgtgtagtttaaccagtatatagaacggcctccctttgccaacaacagcgatgtgctaaagattacgattccgaatgaggtaatgcgatctattccccataggcaaagtgaaagtgttttcaaggactattaacccatcggaagagcttgattagctttgatccttcgtgtatacagcgtctactgggaatctagtgggaactagagtgaacctaatgagccaacatggaaattcagtggcaggcgaagatgtatgtcggaatctcaatgatttcaacgtttccaaggacgccggttggcaccatcctgcggcaacatggaacctacatggaaatcatgtttgtatcagtcagtgggcgcatgatgcatgcgcccagcccttggctgactgatactagcaagcttttgtctgactgaacgcatgcatcataaagagcgattgggtatcgagctggttgcgggatgcagggcggataaaactaatcagccgttatattcgatatgtaggctggggtcgctttcgtgttcgtcaatgatttggttgtaagccttgaccagacgcgaaagggtttcgtgacgtgctgcgttggtgaagtgaccatgctcgtgcacattgctggaaaggaacgattgcaggtcccaaacttcaaggcggttttcgaagcccatgtcggaggctaagtcccatgcggttttgacgcggtcgcgtacagtgatgatgattggatgcagcccggccttgatgttgcgctggcatttatccatgagtagggatgctggggcagtggtgcagtgtatggctgtgtcgccgacattgaaatcgcctccacgcccagtcggatcgtcagcaacggacgcgccgttgatttctacttctggggcaacgatggtgagcttcgctgcgacaagatgttgcagaacggtaccgacgtacatagtgcccggattttccttttgtcgctgcgctgcctgctgcagcagatgttccacagccgcatcgacggaaagcgagttgtcggattccaatttgaatggtttgctggtgaagaatgcccgaattcgtttgacccagtattgctcgatctcggtgaattgctccgctgttggacgtaattcgttaatgagctcggcatagtcgtgcatcaatgccatggtgccgcggctggttcgtccgccctctgctgcgaggagtcgtgtgatgccatattcggcaaggattttctggcagttgtctttgctgattcccttgacttgaccttccttattcgtgtgatagtcgctggcgtcaacgggaagcgtgtctgcggaaaagaagcgattgagctggatggcggcagccaaagcgcccttggtgtttacctgatgggactgtcggaaatcatcgatgggagtcagatccattgtttgcctcgcttatgcagtgtgattcgagagcagagtttgctccacgtacaggtctttgccaagggtgttgttcagagcaggcatgaagtaatgcttgccgagccattccacgacagggacggagacagcgtcgccgaatccgaacatcacttgattggggcgcaggcccgtaatgttgtagtgggccgcgcccataagagcagcgtattcgcgtggcgtcatccaacggacagcggcttgaccattgcccatgcgaatgattgcctggcgagatgagccgcctcgtgcggtgcgcaggcagccggagatgtcgtctgcgcgaacttcccatacggctttgccgttgcgggtgcggcgataagcggtccggtaggaaacggttgtttcgttacgcaacgtttccacgcgggcagtctgaaccggcgacagcgaatcaaggaatttggcggttctttcggcgtcccaccagcgttcgtcgtcatcagccatgttctcgacgtacatattgaggccggacatcagaggagacggcggctcaggcagcggtgcgcgatgcgtgcggagagaggtgtccgcaaagacctgctgcagccagtcagggcgcaacgaagaatcgaattgttcggcggacggcgggttctgcaggccaaccaaaaagagtcgcggtcgggactgagggataaatcgacgggtatcgatggacaatacgtctacggagtagcccagtacattgaaagcatgcaccgctgcggcgagatcctccccagagtgggaagtggccaatccgttcacattttcgagaatggcaatcggaggacggctgtccccaagttcttcgagcagtcgcacgtattgccagaaagcgccggattgtttgccgttcaggcccgtacgagtgcctgcaagggagagatccgtgcaaggagaggatccccaagcgatggaagcatcatggggcaggtcgtcgccggagagctcgctcatatccccctcgacaagggtgtggcccggcgtatccgtgaagttattgcgatacatttcgcacttggcggagtcgatgtcgttcgaccattcgacttggaagccggattcttcgagcccaaggcgtgcgaggcctattccggcaaagaattcgagggcttgtgggcatgccttgccggtagccgcgtgcgtgcgattgtcgttcatgctcccaccttacctcgtgcctgactgtcgtcctaaccatgatactctatatatagaacaagtgttcgaataagtgtcgtgaaggaaagaggatcgtatgacgaagcttagtgatgctgttaacgcgtcgaacttggattttcatgaattagcccggagatccaacgtgagtgagaaaagactaaatggatatctgtcgggtcgacattcgtttagccgggcacctctagaagacgccgtagctattgctaatgctctcggaggccgtattgaagattacatggaagatgcggcgggggacggcgaggcggaaaagctggatgaccgacttcgtctccaattatttctagatagcgttgacgaatacgagctaattatgaagaatgtcggtcgccctcaggcagtgacgattggcggctctggagaaaaaaccgagaaaaggtatagtcagctgattgttgaagggatgctattgcgcaaatattattcctcggatgaagttcaattggcgaaagtgattgattcgtttaggcgtcttatcccagacgacgcgtctccagatgtgctgcatacagtagatctgctggaaaaagatacgcctagccaggggaataagagccagattgtgttttctaatgctgatggtagttactccagcggtgtggatttactttttgatgttctctatggaattaccctgcatggagatcctgataggatccagagacttgctagatggccaattacggcacagtgccttgccttatatgaggctaacgttgagagacgcaagggtgtggtgactgttcgacagtatatagatcttgcaatcaaagatggtctttttgcgctggattaatgagcgtatttgagaaggcgcggggcagttcgctgtggattgaattgcctcacgccttgctgagtgaactcgctgcagcagtttctaagatcagctgctattcgcactctcgccgggctatctcgcgacgggctttgctggcccacaggtctcccttaccgatgagctcattcaattgcgtggcgttgagctgttggtagtgcaggtctgttgcgtagggagggagactcgccttccatccggcaatgtctgtgacgaaaccgtcggcttcgcctgttgagggatgatgagtggcgttctcgctcgcgccatcttgccgtcttgccagttcagatgtcggttcgtttgccgtaaggcattgcaaatcttgcgttttctccggatcgcccacggatcggcatcgtcggacaaggtgggaaacaccgtcttgtctggttcgtgcggaacgttgcaatagcttggttttgacgaaggcggcaagatggcagcagctcttgtgacagagaccggatccggcacagttgcttctgaagtctcagtttgttcaccgctgagggtgtccgtggcttccgcactcaaatcttcagaactttcctgattcggatgatccgcataatccggcgacagtcaccaccacatgttgccgtacttcttgcttgccagcagtggctttgggcgtcgtctgccgtccagaacttgctgcttgctgaactcgcctttcgcttcgttgattactctgtacgacggcacaccccaatacaagctatccggtgtgagctccttgttgtggtcgaagtagtcttggatggaacgtacgcatgtcactgtcctcgcgctcgctggtgccgtaagcgctctggttaagcgattccgccgtatcgtccgtttcgccaagccagcggacatgtgcgcagccaagcagcggattatcctccaaccggtaggccagggctcgcggcatcggatccagattgaacttgaccggtgcgaacagccgctgctccccattcttcggatcctttgccatcagaaaagcggctcgcgctgcgccgacgatgccgatactgccgcctccgcgatatatcgccgctccttggcccttattgagatgtcacagcgcgataaccgtgcagccggtttcctcacacagccttttgagcggagccatcacctgcgcgcggatatcctgacccttgtagctgttggtgtcgctgcccaaaaacgacatcaacacatccacgacaatcaggccgatatgctgctcacgcacagcctgtgctatctgtggcagtgcgtcggtgagcgtaatcgctacctccttgccatccttgaaaacttccgatagcgcgaacatcttggatgcgtcgccttgtgcggcgcgaatgcgtgggctcacggtgtccgccagtccatcttccgcagtcagcagcagcacgtttgcggggtcgcatccagcagacccatccggccatactgttcccgtggtgacgtgagctgcgatatctaaggccaaggtgcttttgccagtcgccggatcgccgtcaatcagtacgatctttcctttgggaatatggcccggccgcaaccacaacggtcgctccggtttcacatcagccaaacgggtcagcgaataggcgcggggcgtcggttcagtcttaagctcagactcaggctggctgcttccgcttggcaaaatctcaaactccaagccgctcatcgccgcgttggaagcgtcgtgagcctcacccagccgcctggataaacgtcaacgaccgcacgaacggtgtcagcgtctgcgccacttgctccttccagcgagtgccggtgtcgtccttatacacaatggcaaccacatcagccccactaagggctaagcgcgctgaatcaagatccagtttcgcggcgaagttgccgccgcctcccgctgcggttacagcggcatagccgagcgctcgcaatgtgccggcatctttttctccctctatcagatacactggcttgcccgataccatggcacgtttcgcgtcggcggccatccacaacgggtgcttgtcggcggtgttgccgctttgcctcgttgagccatgcttccgcctaggtctcatagccttcgtcgaatcgcttgtgaatgcgtgcaggaagatgcggatactgggatcgggcttcgacgggcgggatgtatgaggcgtcgtaggagatctgcccgttggcaccgacttttctctcaatcttgccgaaccggcgtcgtcgactggctggccgtgtgctttgtgaagtgcgtgccatgatgatcaattccaaccgacgtaaaagctgccaagcgggcgactctgaagtctgccgctcaagtgcttaagcggcaccgcttatcttgccgcctatcttactgtaaaagacgggtcgaaaaggatgatgaaggagagtgggtaatcgttgaaaaaaccgccaaaaacgttgaaattccgccgtttcgggcatgaaaaaagggcttccgaaatcattcgaaaaccctactggcggagaatacgagattcgaactcgtgaggctgttacaccaacacgctttccaagcgtgcgccatagaccactaggcgaattctccaattatgcaacgcctcacagtgtctatccgtgaaacgcaacttgattaggatacaacagtttctcctaaaccacaaatcggcgtgtcgcaacatctcagatcatccactcactgaaggaatccgatgcatgcgaacttccccgcgtaccaaatcctccaccctctgggacaattcacctaccaacacatctctcagcgtcccaaatcatccactcactggaataaccagtacgtccacaggccttccacagtccgaaaacctccacccaccggaggaatcctcccgcggaccggcttgccgacgtccataatcccccaccggccggaggaaaacaccctatgcgaataaaaaaaaagaccttccgggaatcccataagggactcgaccagaaggtccgacgttgaatgcggcggcgtgctactctcccacaccctctcgagtgcagtaccatcgccgcgaccaggccttagcttccgggttcggaaagggaccgggcgtctcacctgggccatgaccaccgcaaaaccaatataacggccaacccccaaccgggatcggccggcaacggaaccagccacacgaccgattccggtcgtggcggtccgggaaccggacaacggacgcgaacaacaaacgcttcaccggtatcgtttccgtgaccacaagaaacaatgctccttgccatccaacgaaagaaaccaccacaggacgagacccgacccaacaagcgggtcggaaagagtgtgccgcgttcgcccgttagtaccggtcggctccacccctcgcgggacttccacctccggcctatcgaacacgtgttcaacatgcgggctacaggcgctccggggagcgtcaaggaatcctaatcttggagcaggcttcccgcttagatgctttcagcggttatccctcccgaacgtagccaaccggccatgccgctggcgcgacaaccggcataccagaggtccgtccacccaggtcctctcgtactatgggcaggcctcctcaggattccaacgagcgcagaggatagagaccaaactgtctcacgacgttctgaacccagctcgcgtgccgctttaatcggcgaacagccgaacccttgggacctgctccagccccaggatgcgacgagccgacatcgaggtgccaaaccatcccgtcgatatggactcttgggaatgatcagcctgttatccccggggtaccttttatccgttgagcgatgccgcgcccgtgcgccggcaccggatcactatctccgactttcgtccctgcccgaaccgtcgttctcgcagtcaagcccgcttgtgcgattacactcgaaacccgattgccaaccgggctgagcggacctttgagcgcctccgttactctttgggaggcaaccgccccagttaaactacccgccaggcactgtccctgaacaggatgactgttcgaggtgagacgtcaaacgagaacagagcggtatttcaccttgcggctccacacgggctggcgcccatgcttcgaagcctcccgcctatgctacacaatccgcgcctaacgccaataccaaggtatagtaaaggtcccggggtcttttcgtccttctgcgcttaacgagcatctttactcgtactgcaatttcgccgagctcctggtcgagacagtggggaagtcgttacgccattcgtgcaggtcggaacttacccgacaaggaatttcgctaccttaggatggttatagttaccaccgccgtttaccggggcttgaattcaccgcttcaccccaaaaggggctgacggatcctcttaaccttccggcaccgggcaggcgtcagtgcatatacagcggcttgcgccttcgcatgcacctgtgtttttggtaaacagtcgctaccccctggtctgtgccacccccaaacgctccgagggcaagcctcttcacgcccgggggtctcccttataccgaaggcacgggagtgatttgccgagttccttgaccaggattcgctcgatcgccttggtattctctacctgaccaccagtgtcggtttggggtacgggcggcgacgcccctcgcgccgaggcttttctcgacggcctggaccaccggatatcgcgccaaaaagacgcccatcatcacacctcaccctacatgccccacggatttgcctatgggacgggctgcgtgcttgaccacggaaaaccacctccgcggccggctcccattccgtgtcacccctgtgcgctagcctaccaggactacgctcccaacgaccgcggacaccgaaccccgaagggaacgacgccacgcgaccggaggttagtactcatccgttcggctcttacggtacgccgccggtacgggaatatccacccgttcatccattcgactacgcctgtcggcctcgccttaggacccgactcacccggggacgacgaacgtggccccggaacccttggtcatccagcggacgggatcctcacccgtctctcgctactcatgtctgcattctcactcccgcgcggtccacggcacggttccccggccgcttcgccccacgcgggacgctctcctacccaacggccatacgaccgctgccgcgtcttcggtggtgtgcttgagccccgctacattgtcggcgcggaaccactagaccagtgagctgttacgcactctttcaaggatggctgcttctgagccaacctcctggctgtctatgcgactccacatcctttcccacttagcacacgcttcgggaccttagacgacgatctgggctgtctccctctcgacgacggagcttatcccccgccgactcactgccggaatacacatccacggtattcggagtttggctgctattggtaccccatacgggcccgcaagcatccagtagctctacccccgcgatgcaatcaaccgacgctgcacctaaatgcatttcggagagaaccagctatcacggaatttgattggcctttcacccctagccccaggtcatccccccggttttcaacccaggtgggttcggtcctccacgcggtcttacccgcgcttcaacctgcccagggctagatcatcccgcttcgggtccagggcgcgcgactcaaaacgccttttgagactcgccttcgctacggctcccccaccacgggttagcctcgccacgcaccactgactcgcagactcatttttcgataggcacgccgtcaccccacagggaggctccgacggattgtaggcgcacggtttcaggaactctttcactcccctcccggggtgcttttcacctttccctcacggtactggtacgctatcggtcagacaggtatgcttagacttaccccacggtcggggccgattcacacgggattccacgaggcccgcgctacttgggacacatgatcggaagacggcaagcttccaggtacggggctggcaccctctgcggccaggccttcaagcctgttcccctggcaagccgttttatgactcccgcccggtccgtcggaaccgggacacacgctcccgcaacaccacgaacgcaacccccgacgggtatcacgcgcccatggtttggtctgatccgctttcgctcgccactactcacggagtatcccttcctgcaggtactgagatgtttcacttccctgcgtacccccggaacaacaaggttccgtgccggcccatgacggccggcgggttgccccattcggaaatcctcggatcgaagccatgttggaggctccccgaggcttatcgcatcctcaaacgtccttcatcggtactgtctgccaaggcatccaccatacgcccttcagggcggcacacgccccgaaaaaccctaatgatagcttcaaacgccagacgacaaatcatcacactgtaaaaaatgatcacaaaacgatcgatctcgaaaccagactccaaaaaagagcctggcgaaatcgcgataaagcaagcaggacaacaatcctgcattgctcgcgtccactatccagttctcaaaccaccacgcgccccgaccggacccgacccacaggcccacaggcccacggcgtcccgccaggggcatccggaaaaccgcacgcgaccaagtcgcgggtggcggtccgggaacccaaaagcatatccgcaccactccccgcacggccccaaggacccgcgaagccaacgatctcttccacaccagcacgcccgcgccaaaccggagacgatccccggcacgcgggccacacgacggacgccagaccggcgtcctgaaaaactccgtagaaaggaggtgatccagccgcaccttccggtacggctaccttgttacgacttagtcccaatcacgagtctcaccttagacggctccatccacaaagggttaggccaccggcttcgggtgctacccactttcatgacttgacgggcggtgtgtacaaggcccgggaacgcattcaccgcggcgttgctgatccgcgattactagcgactccgccttcatggagtcgggttgcagactccaatccgaactgagaccggttttcagggatccgctccacgtcgccgtgtcgcatcccgttgtaccggccattgtagcatgcgtgaagccctggacgtaaggggcatgatgatctgacgtcatccccaccttcctccgagttgaccccggcggtcccccgtgagttcccaccatgacgtgctggcaacacagggcgagggttgcgctcgttgcgggacttaacccaacatctcacgacacgagctgacgacgaccatgcaccacctgtgaacccgccccgaagggaaacgacatctctgccgcggtcgggaacatgtcaagcccaggtaaggttcttcgcgttgcatcgaattaatccgcatgctccgccgcttgtgcgggcccccgtcaatttctttgagttttagccttgcggccgtactccccaggcgggatgcttaacgcgttagctccgacacggaacccgtggaacgggccccacatccagcatccaccgtttacggcgtggactaccagggtatctaatcctgttcgctccccacgctttcgctcctcagcgtcagtaacggcccagagacctgccttcgccattggtgttcttcccgatatctacacattccaccgttacaccgggaattccagtctcccctaccgcactccagcccgcccgtacccggcgcagatccaccgttaagcgatggactttcacaccggacgcgacgaaccgcctacgagccctttacgcccaataattccggataacgcttgcaccctacgtattaccgcggctgctggcacgtagttagccggtgcttattcgaaaggtacactcacccgaaggcttgctcccgatcaaaagcggtttacaacccgaaggccgtcatcccgcacgcggcgtcgctgcatcaggcttgcgcccattgtgcaatattccccactgctgcctcccgtaggagtctgggccgtatctcagtcccaatgtggccggtcgccctctcaggccggctacccgtcgtaggctcggtgggccgttaccccgccgactacctgataggacgcgaccccatcccataccgatgaaatctttcccgacaccccatgcgaggagtcggagcatccggcattaccacccgtttccaggagctattccggtgtatggggcaggtcggtcacgcattactcacccgttcgccactctcaccaccaagcaaagcttgatggatcccgttcgacttgcatgtgttaagcacgccgccagcgttcatcctgagccagaatcgaaccctccacaaaaaaactttgcagaaagccaacatgtgactctcaaaaataagaaaattgacgatcgccttataaggaaaggcgcatcgcacgaaaaccccaccgtccttcaaggcctcccggccactcgcgaacgagcggacgatgaactggcaatcattgactataaagaagtagtacaaatacgctcttgagttctcaaaccaccaccactcacccgcctcgaggcaccccaaccggggaaccactcgccgagcagcagcaagagataaacctacagcacaatcccattccacgcaaatcgggcatgacgaaacaagacgcgaacccttgcaaacactggaaagcatcggcgtgtcgaaaacacgggaaaaacgggctgcggacgccatcgcgtagcgaaagaccgtcggaaaaaccctgaaacacctcaccgcaaaccaacatccgggcgtgtcgcaaccacactatccgtttacggcccatcccccaagccaacccatccgagaaaacctcccagccgaaagctgaaataggagaaacagaagaaagcagataaacgaaaccgcaccgccgatcgttgtcctgaacacattcagatcccaactgatcgaaagtgcggttttgcatatgcgcgtgcaagcgacggcagaacaaggcagcgcagccaaaaatcgattaatcggtgcaaccgaaacggtagagcgcccagccctggccatactgcgaataatcggcaaccttcaccaacgtgccgccatccacatacgtatcaatcaattcctcattgtggaaggaatcgtactgggcgcgatacgggaacgactgcaagctttgcgcctggtcgcccatcgtaaggaagtactccggagcgtcagtcagcggacataccgtgccaagcacctgctgcccatcgccggaagcaaacgcagtctccactttgccgaacggaacggatggcacatcggtgcgcgcattgatgatcggatacaacatgttcgcgttgaacagcgtctccgcatacatcgaaccgttcaacggatcggaaatgatggtggcctgggtgcccgtacgtttcgtgaccttgcgcagcacagcgatcttttgctcggtgagctgctcgttggggtcgctttggttcagactggaatgcgcgatgatcgtgtcgcgagccgcggaacgcgatgggcatacgatctgcgcggaaaccgcaagtatcgcaatcacaaggaatacggcgattaggacgatccaattggaagcgaaagaagcgttcttcacggaagaaacagcagacgcagaagaaagggaaggaacggaagaagcactattcttcgtggaaaaggacgatgcagaaggagcgaaagaagcggatgcggcgcacgcggaaacgcattcggcaagagcgttgattccaatgacaagcagcggcagcgtgaccagcggaagcatggtcataatacggttttcatcgcgataccaaggagagctgatgatattcggcagcgcgccaaccaacgtgaccgtgcacacatataccagcgtggctagcagaaacgcggccgtcaacgcgatcacgtcacgcagacgatcgttgcggcgaggtcgagatggttcggacagtgcggacgcggcatcagtggcgttggagtgcgacgcaggtggcggacaggaaacggaaaccggggaatcagcggcggaaaccgcaatatcagaagtcgaagcatcaacatcgacatcagcagaagccacgggaaccacagtggaagcagccgacgaaaacgaatccgaagcacgcgcagccgcgcggcgggaagcgcaaacgaaagcggccgcagttcccgcaatcagcaacagtgcgaacagaatcgcaggaaaaccgtcaagcccatccgtgagacagaacgaaatcgactcccacaaattcttggacggctgatggctatggaaccaggaagcgggattcgcccaacggtccgatttgaacgacgtcagcatcaacgccacaaacgccaccgcaccgacgcacatggcaatgaacgcgccaagaatcagcttccacggcaagcgcagcacaatgaacggcaccagaatcagagcatacgtgaatgcgatacgcgggtgcgcaacgaggcaaaccacgcctgcgacagcagcgatcgcaagccattttgctatatgctcgcgcgcggcgatcgcatcgaacaagcgcaatgtggcggcgatgaggaacggcagcagcgacgtggcgaaaccgaatgcgatcagcggaccggcattcagcagtccgtacgggtggcacaccgagctgacggcaagcacgggcacgaacagtccaatcagattccgcagaacgaaagtagcgtcgaaagtgacgttatattgccgattcacagctgacgatacctgctgatttgaaacattcgacgattcagatacggacgacgattcaggcgtagacgatgcttgagaaatacgtgaaattggattggaaattggattaccgcgattccaacgttgcaggaaatacctgcataataccagcattccggcagggaaaatcacgcccgaagcaatgatccacgtgatattgaatgccgcgtagatcgaacattgcacgccgaacagcgccgcgatcttaatcacaaggtaagcacagatgtgaaacaacggcggataaaacgaatcatgcggccacaaatgcagagccgcccccaatccctcgtcaagcagacggtgaatgaaatagtaatgcgcgggggcatcgctgctgacgatcggcgtattccacaccgtggaggggaaccacgcaatcaccaggcatagtgcggacgcgacgccgataatcgacgtaagccacggcaataacgcgtgacgcgatgcaggacgcagcatcgcgtggcaccgctgcaggccatgtttctgcccggacggaccgcccttggccgaatcattcctggctggaccattcgtagccgaaccatccttggccgagccattctgccgagcctgagtctgcacataagcctgcacatgagttcgcgcacgagcctgagccgagccacaatcgcccgacacggaaccggtattcgtaatctgttcggaagtcatcgattccatcgtagcgagtgccgcaaccatgctcaacgcttattctctggaatcacttttcaggaatcattcagacttcatgcaggggtataacagtgttgcgcaagaaaacaatcacgttggaagcccaagatgattgcacgggacgcatcatgcgctacgggcctgccttgctgcggagcgcgcgtcccggccaacgctgacgtcggcatgcgccggcgcgctataacagagaactggagaagtaccgcatgttcgttctcaagaacgcatgggcggcgcttggtcgcgtcaaatggcgcaccgcgctgatcgccctactcgcactactggtgtctttctcggctgccgtggacttggcagtgattcgagccgacgacaccgccaataatgaaacataccagtcgcaaaaagccacggcggtgattcggccgaacgcgcaaacacaagccaagcgcgacggtgccgattccagctataccgacaagtatttgacgtgggaaaagtacagcacgtatgcaacggccgcacagagcaacaacgtgaccttcaattacacgttggcaacatcggtgccggtgcgcgaaagcaagtcgttgcaggcgatcgccgcgaaaaacgacaccagcgaagacaagaccggcggcaacctgaccctgcaggcgttctacacgttggacgccgcgaaaatcaacgactacggctactacaaggtagtcaaaggcaagcatctgagctataagacgcagagcgacggcgtactcatttcgcaggcgctggccgataagaacaatctcaaggtcggcgacaaagtgacggtcggcaatccgtcgaaggcttccgacacatacacgttcaccgtgcgcggcatttacgaatacgacagcgacgtgccggaaggcaacggatccgacgcgaaatacgcaaaggacaatcgtgagaacgtgatctacacgacgtatatcaacttcgccaagaacgggctcgacacgacggaggccacgggatgggccattccgaatctgaatatcatcttctcgctggcgaatccttccacctacaacacgttcgtgcgcttggtgaagaaggccaagttggacacgaagacgtacgagatcacctcgccgtcgcttaccgcttacaagaagtcgatcgagccgcttgattccgccgcttcggcagcgcgcatcatgctgattgccgtgacgattgtcggtggcatcgctttgctggcattgattgcatgtgctgcgattggcggccgccgcgatgagatcggcatggcgatgatcacaggtgtgaccaagggccgtttgggatggcagttcatgctggaaacgttcatgatgacggttccgggttggattgtcggtttggttgcgggcgcgctgttggcgaagccgatcggcaccgcatgggccggcgggcaggctgtgtcgatgacgtccgcttcggtgtggaacgtgatctggtacggcttgggcgcatgcctggtgcttggcatcgtggcattcgcgcgcgtggcctgcttcaacctgaaccaactgtttgaggaacgctcggaggtgaaggcatgagcgacaacatgaatgataagaacgagaacctcgacgagaccgtggtcgacgagactgccgagaccgcatcaaacgagaccgtcgatgatgttgcgactgacgatattgcagctgacgcatcttccgctgattccattgaatccatcgattttgcggtggtatacgacgatgacaatgcagatatcgaaattgccgcaactgacggcgcggaaattcccgacgatgtaaacgatggcgatactgcagtagctgccgacggcgatgctgtggtatctgcagataatgcagataccactgaagttgcagatgacgctgcaactgctgctgatactgcggatggttcggatgtggtcgccaacaatgcgaatcaagtaaaggaaacgctcgctttgcgttcttccgacgcaccgaccgcactggaaacgcatgaagcggcgaaagccgattccgcaaccagcgtttcgtcacagcttgacaacgaaatcaagcgcaatcgcaaaaaggatgagttcttcttcaaggcgaatccgacgttcgcactcgaccatgtgaccgtgaccaatcgcaagaccggccgcaatattcttgacgacctgtcgttgtcgttccatgcgggcgccacgcatgcggtgctcgtggacgcggaggatcgcgaacagcatcaggcattgctggccaccatggtcggcatggtgcgcccggaccgcggcaatgtgatgcacaaaagcgccaacctgagcgacgtcgaaccggtcgaaatgttggggcaccgcatcggattcattccgcaacgttttgctttccgccccgatctcgacgcggaaagcaatgtgctgtacgccatggatgcgtcgaaccgcaacttcctcaagccgaagcctgtgatcgcccgcgaactgctcaagcgcgtgggcttcgatgaagtgacgtccggactggcagtcggcgaagcaagcgaactgaaccagcgtcgcgtggccatcgctcgtgcgctgagctgcgaggctgaagtgatcatcgccgacgagccgaccgctggattggatgccgacgatgcggccgtggtgttggatctgttgaagaagttcaagcgcgatgccgatcgcaaacgcgccatcatcgtggtgaccaccaatccagaggtcgccgatgcgatggatcacagcgtggaactcgactagccgcctagtgcaacgggcgcacgaacatagactctttcgcgcgcccataggtaagccctttggaattctggttttagccaaattccaaagggcttacgtgttctgaaaacagtctgccttactccgcgatacgcatgtggtactgctcggcgagcggcgtaacgtcaagcacgccgtatcgttcgagcagccgcagccattcgcgcctgttgctttcgccgaaacgggccgccttgcgcgcataggcttcggccgtcaggaacttcggcggaatcgacttgctgttgtacttgtcggccaccatcaccacttcctgctcaagattcatgggcacatagtcggccggaggcagcggcaacccttgcgattccaccgtttctttggtgagtcccacaccggtgtggttgcgtgcgaactgcgcgatcgactcgtcaacaccctcgttcaacaaatattcgtagcctttaagcccatgccgtacgtaattcggaccgtcgaatttcagcggcccaccgtcggaaccgtcttgtttgagcagaaaatacgtgccgatatcatgcagcagaccaccgatcaccaccaaatgctcgtcgatcagcctcggcggaacggttccgcccgtaatcccgtccgatgatggaacggaaggaatgcgaagcatgccgaacgattcgcttccattaccgtcttgcgtaagcctaaggccgaaatcacccgctttttcaggggcatcatccggtagcgtgcagcggcgggtgaacagtgcgttctgtctgcgtgccatgcgacgtgcgatgtcggcaacgactacgcaatgtccgtgaatcaaatcgtatgcggcttgcgattgcgcgatttttcgatgcagttcgtcaacttgggcgagtgtaggaatatatccggttgtcataccgcctatcttaggcgctgtatgacgattgccacatgctgaatcaggtcgaaaaaaaaactggaaatcccagatgaaaattccagtcgagaaattccgaaatacggatttcagattacggatttcagatggaacgcacacgaaatgcgccggtacggttggaagcaataatcatctgatcgttttccaaacgagtccagccatcttcggcacactgatcgaaaccggagctggccacaaccacgcccttcagctgacctgcagcctgatccgcttcggattcaccgagcgtacgatagcgcatcacacgataatcatgcgcctggttgccacggccgtactggtcgtagatttccacgatgcgcttggacgtgacctcacgaccggccgcgcacagagcgatgaactggtcttggctctggatcatgcagttgtagctggacttcggatagcttttgcgcagttcgcgcacagcctgcgcgaccgcctcgtcgagtgcgaaaccaaaaccgatgtactgcagaatcactgcaaagaaaatggcggaatcggaacgaccgccggtagactgcacgatgctcggatcgaccgggaacgcacggttggtgatgatgttgcggccctgatcgtcggagatatcgccattgtggatgaagctcaatccgttggcgtagaacggctgctggttctcgagaatcagcggcaggttcgagctggccaaacgcaagtgccacaggcctccacgagccggagtgttcgcaaactcgtcgaaaatcggatcatgtcgggctgcgatcgtgttcttgtagatggcggtgccggtttccggagtgggagcgccaccgtcacgcagatacggcgactcgctcggcacggtgaccagcgcggagccccagccatcgttgtggatttcgctcagatcgcggaaatcgcgtatggcctgcatgccgagcacgccattgagactggtgttgcttcctgctgccgcgaatccaagtaatctgcacatggttgattactctacagggcttgtgatgcaacgcgcgcatatggctatcgacattgcttatagcgtgcgaaaaacagcgggattccaacaattcttcgcgataagaccatgcaaaaacctacaaaatgccctacgaaaacgggctgcgcgatgatggcggatacaatcaccatcatcgcgcagcccgtttcacggcttgtttcacacgcgctttagccgcggaggacgctgagtcgcgaggaacagcggctgtatctcaatcagcggattgtaaggcgcaaggccgaaccatttgaccggagatcccgcaagacgacgaatcgcatacttgacttccaaagaaatcgcgccacgctgcgacaccttcgactcaggcataagcgccttgtgaatcagcacatatcgaatcggaccgatattcggatcagcatcaagcttcggatagcggctttcctgcctcggtagatccccagacttcgacaaatcgttcataatctgatgaatataagctggaatcgactgagaaaccttgaaaccaagccgaatgcgaacacggaacatgtaatccgtgccgaaattctcaaccgaatactcgcgggtgaacggctcatcggcggtctcgacggaaaccgcccaccaagcgcgggcacgttttggatggtcggcgaaaatcgagaagaagatatcggtatcgatacgcttcgtttccggatccgacgtgaggtagatgatattgtctgcaaaatatggaatcgtatcgtcatcatgcagccgcttcagcaccggtagacattcggcgggctgcatatgacgacgctgcgcacgttccagcttcgtgccttcgttccacgtgtacataaccagcagaatcgcgaaggtaagcagcatcgtgaaccaaccaccatgcaggaacttcgccatggaagcgaagaagaacatgaattggatcgcaaggaacagcacggtgaatacgaccgctccgatacgacgccccgaatgccagatgtagacggcaagcagaatggtggtagtgatcatggtgatggtcaacgccagaccatacgccgcggaaatatgctcggaatcacggaatagcgccaaaaccaacagcgtggaaacgcaaagcaccgcattgaccacaggaatgtacagctggccgcgggtacgggccgggtaacggacctgaagatgcggcatccagttcagatgggtggcttcagacaccatcgtgaacgcgccggtgatcaacgcctgcgatgcgataacgcccgcgaccacggaaagcacgacggccacgtaacgcacgctgggcgtcatcatttcgaagaacgggttcaaaccgtgcgtgcggatgtaagccgaatcatcccaatgattgagcatccatgcgccttggccgaaataacagagcacaagcgcgattttgataaacggccacgtgaaatagatgttgccacggccaacatgacccatgtcggaataaagcgcttcggcaccggtggttgacaggaacaccgtacccatgatggcaagcccggcggcattatggctgctgaacaggaatctgacaccgtacacggggttgagcgccgcgaacacgctccaatactgactgaggttcgccaagccgacaaccgccaggaacgagaaccagacaagcacgaccgaaccgaacgccttgccgatacgctcggtgccacgcgactgcacagagaacagcatcagaatgatggccgcggtgatcatcagggtcagctgcttgttttcagtgaaaagtttttcaaaagctggtagcgtctccaagccttccactgccgagctgatggacacagccggggtgagtacggaatcggcgaggaacgcggcgccgccgagcatggcaggaatcgcaagccatgcaccgtactttcgaaccaacgagtacagcgcgaaaatgccgccttcgcccttgttgtcgatacgcatggcaatcagcacgtatttgacggtggtgataagcgtgattgaccagaacaccaacgaaagcacgccgagcacggcttcgcggtcggcatgcgcaagtccgccctgcccgttgaggaacgtctgcatggtgtacagcggcgaggtgccgatatcgccatataccacgcccaacgccacgatcgccatggcgggcgtgattctgtttggaccggattgcagacggctccaccaacgaccgacgggacccttgctggccacctggtcaagtttggcggcctcctgctgtttctcctcgtgctgcttgatcagcacctgtcgctcttccttggtcagcaccttgtgcgaaaccttcggcgcctgcgtgtatgtggctgcgtgaaacagcggctcaccctcgtttggctcgttagccataacgctacctccaagtggcgggccttccaacccactccccaaaataaacgcaaaaaggtacgttaggagccttacgaagtcttgtcaaatcttcacattgtttcttgcgattcttgatctcgcacgaagtaaacttcctgtgggtttttttcttattttacctcttgtctttctcttactctctcttattttcggataaatcgtttccgtcctgtcgattttcggaatttgttcagattccgtacacttcgcgcgtggtctttcgcgttgcctgcgcgacttccgtcagcggtttatcgagataattcgccaacgactgcagggtgtaggggatcatgtatggcgcgttggtgcggccccgatacggcatcggacttaggtagggggcatctgtttcgaccatgacatgactgagcccgacaatgcgcgccgactcgcgaataccatcgttgcccttatagctggatgtgcccgaaaggctgagataccaaccgttttcacgtgcgatctcacccatttcggcatcaccggaatagctgtggaacacggtccgttcaggagcgccgtccgccagcagcgtttcgatgacttccttatgtgaatcgcgatcatggatctgcatgggcaggttcagttctttcgcgagcgcgatgtgcgcgcggaaagcttcccgctggagttctttggcggcttcgccggtgcggaagagatccatgccggtttcgcctatggccacaacctgattggggtaagtgatagcgagacggtgtacttcggccatggcgtcttcgaagttggtgtcatgccagggtttgtatttgagcggaagtccgtctggtccgggcactccacgatggccgtggagcacggattcgttggggtgtatggcgatggccgcatgcacggtttgggggtgttcgcgtgccatgtcgatggccgtcatgaggttcggcagttcgcatccgcagtcgatgacgccttcgactccgacttgttgcgcttggttcagcagttcgtcgacgctgtatacggggacttccggctgtcctttttcttgcgcttcgtggctcatggctcgcgagaacggcacgacggacgccacatgcgtgtggttgtcgatgacgtgcgcgttctcgggaagtggttgcggtgctggcgcccagctgcggtcacgatggtgtttgctcatgcctccagcctacgctcgatggcagtcttgcttcggaagccgcgttattcattgatggcagtgggattaaccaacgcacctccatatgttttgcggcgtagcgctgaaacgctttccgcgattagtcatggagggtgagggtggtgaaggaccaggagggggcggtgtaggcgccgctggttaggtcgattgcggtttcaaccggaacggttggcgaagccttgccgatttcaccggcgtacgggtcggttccggcgagcacggtggcggttgccgaagcgcgggattccgcggaaacatcaagctcttcaagcacttggttcagatcaatctcggcttcagcgtcgagcgcgttgacgatacgcacgtaggtgacgccttcagcatcattgcgagccacggtgacggtacggcggggctcttccggcttctcaacaccctgtgcaacaagctctccatcgatatacagcttcatgctttcgccgcgatcggccacttcgatgcgcacctgccacacggttccggggaacacttcgtccatggaccattcggtgccgtcaagattgtaggcggtaccgtcgcgcaccaccttgatttcgaaagcacgaccgaaggaggtgatgttgtggttcttgccgttgatgtcgccgtggaccagctgcaagccccaacgaccctgatagtaggtgatggtggcgttgatggtgtaggcgtcagagtcaatgttgaggctcgtgttcatcggaccattgcctgcgtaatggcagtcctcaagatcgatatggcggccatcagcggtgtcaacgctgaagttggtgatgtcggcgtgagcggcaccttccaagcgcaggccaacggttggtggcagttcgcgacgtagcgtggtcttgccttccaccgcgaccggccatgcggtatcggacgtggtggtggcatacatctgctgcacccagtagctgtacggcaggtaggtacgttcgttgtcgaagtagatcagatcaggattccagctgtgatgtccgttcttggcaaacagcggcgcatacgaagacatgaccacggcatcgccgttcaattccatgcgacccatgaacgccgcttcggaaagaccgttgatcagctgcgtgttccacgaaccatactcgcccaagtacaccttcgggccctcacgatccgtggtgtcgtagtggtcgagattgtggaaccaccagctggaggactgataggaatgctcgtcaacgatgggaacgccggcttcacgcgcatactgccaaccagcctcgtagtcgggaccgctcggagccggaccgaccgtgccaaccacaacaatatccgggtaggtggccttgaccgcgtcgaagatctgctggaagcggttcctgaacacgtcatcgatgagatcttcgttgccgatgcccaaatattcaaggttgaacggttccggatgacccatggcggcacgcttggcaccccattcggtggtcgcggcatcgccattgcagaattcgaccaaatgcagcacttcatcgatgtatgccggcatgtctttctgcgcgatcggcaccgggccctgactggtgttctggcagctcacggcggcgggcagcaccggcagcggcttcgcgccaatggtttcgcacaggcacaagtattcgtagtagccgatacggaacgactggtggtagccccacaggttgaaattgtgcggccgatgctcaacatcaccgatggtgcgatcccagtggtacatgttatccatgccaagaccgtgggtgatgcagccgcccgggaagcgcatgaagcgcggctgcaggtcggcgagcgccttgaccaaatcgggacggaaatgcttgagtccgttgtaggtggtgcgtggttcgagggtaacgaaatcaagatcgacggtaccttccgtggtgaaggtgagtcgcaaagcgccttcatgtacaacgatggcattgctttcaccggaaaccgtcagcgaaacctcttgcttacgccaatcgttggaatcgacggtgatatcttgttctgcaatcgcatttccatcgtcgtcaatcagagcgacggtgacgggaagtgcggaagcttcgcaattgctggaaatacgcatccatgcggagaaatcgtaggtttcgccggcacggaagaccatgccgtcccagccgatattttcaagcgaagccggcgcctgttcgacttcgacggacgcatagtgcgggttttcttcggctaccggattgtcggtgagcacgtcgaaggctgcgaaggagccggcgggcacgattttgcgccagaagctgtagttgctccagtcggaggagtcggcgcgattgtattcgaatgcgccgttctgtacgaggtcggcgttgagtccgccgtcgccggagtagctgatgtcttcgtagaagatgccccacaggtcggtgctgatgttgcgcacgcccgccttgttgagggttgcgatgagtttgtcggtcatggtgtgtccttggatggtgttggttgtttgttgggttggatggtgttgcggtacgtgcgattggttgcgattcgacgtctgtctggcaccgtttcgtcatcggtcgaccgccggccgcgctcggggaagcgccgctcatcgggaatctggcgaccgtacgcatcgatgcacagcggggtgccgtcggagtagccgtgcgcatgggcgttggggtcgaaccaacccgcatcgatgactagggtgtctcagccggcgtccttgaggtggtcggccatgaagcgcgcgttggccaggacctcccgatcggtgacggtggtgccgtaggaatcccagctgttccagcccattggcggtcgccatgcttttggcagatcctcggtagtcgccattgccttctccttgtacaacgttagaaaagcgtgccgtttacagtatctgacgtcatccttgacttacttgttcgacttcatcatcttggaaaacttcagatatgtaccgttacatattttatagcatatttcagaaatcacaatcatgataggatatcggtgattctttgaaatttcaacgattaccagaaaatcatcatatataatatcgttacagaaaaacttggctgtaaggagcggtgcatggcaaacggcaaaccgacattgcgcgacgtggcggcggaagccggcgtctcccccatgaccgcatcgaatgcgctgcacggcaaagccggcgtcaaggaatcgacgcgggccaaagtgctggcagcagcgaaaaaactcgactatcgcatcaatctgacagccagcatgctcaaatcaggtcgcagcaacattattcacatcatcgtcaacgaattcgattcgccgttctattcgaagctgacgcaaacattgagccgcgagatcacctcacgcggactcacgccgttcatcgagcaaacccagtattcgccggacgcggccgaacatgcgctgaccagcaatccgttctcagggcagctcttcgacggcgagattctgcacgccaccggattgggcacgaatctaccgctcgccaaactcaacggcgggcgccctctcgtactgctcgacgcatgcgaggaaacgccaaccgtggatgccgtgaattttcccaacgaggagggcgaacgcgctgcgatgcagtatctgatcgcccagggatgccggaatattgcgattgtcgggcatacgttcgtgccgcgcgccgagttggcgcatgcgcagaacgcatttgcattgcgacttcgaggagcgtgcgcggcgttgctggacgcaggattgccatatgacgaaaccatggtgttcgaaggcggtcgctccgacgaaggcattaccgccgggcacgcgatcgccgaacggatcatggcggcgcgaaggacgggctgcggaaccggcgcgggtgctggagaccgcgaaacaggcacggccggaaccgccgatttcaacgatgcaagcggcaagattacgggcagatcgatcgaaacgaccgacaagattcccgcaatcgcgttcgacggagtgtgctgcgccaatgatttcgccgcattcggcgtgattcgcggcctcgccgactatggcatccatgtgccgcaagacgtgaaggtgatcggattcgacggcgtgacttccggaacctacgccaccccttcgctgagcaccatccaagtggatctcgaccagcttgccaaattcgcggtcgatatgattgtcgaacggatcgaacgcggcgaagtgaatgataattccagcaatgccggaaattccaatgatgcaggcacggtgctgccgccgagccgcgcaaccatcggatatcagttggtcgaacgtgaatccacgaccgcgatcatatagctatcgtgcgttccgcgcccgattgcagcggaacgcacgatagccggaaatacggcatttcagcgattggtcggctcagccccgatcagtcgcggcggcgaatggcaaagatgcgggcggagggttgcttggaggtggcggcgttcagacgaaccgtttccggatccatgcgtttgatagtccacggtttggcattgggcgcatggtccggttcggcaggattcgggaacacctgttcgatggtttgatccgcatccaacggcatgttcacggacggtgtgccgccgcgacgccacacgatgatgtagtcgggcttatcttccggctgaggttgctgatcgttctgctcggcagcctgctcattccaagcggattcgccgtacacatacgcgtcacacatatccgtttcgacatgacgcaagccgacggcaagccaatcgccgtcgaagtcgggaagtccggacggccagaacggcaccatatgctgctggtcggcaagtacacaacgatgtaaggcgatagcgtcgcgaacgagtgaaagacgcggctccgtcatgcgatcgatgaaaccagacagatacagcctgccgagcacacccgtagcaagcgtgaacacagcagtctcatcatccatctcttgctgagcgtaaccccaattaccctgctgttccggcagaatcgtcatacctgcaccagccgcaatcgcagcataaatcagaggatcgcactggtcggaagtggactgcaaatccaagcgggacaactgcgcgtaatcggcgcgcatggcaccggaaccgcagttttcgatcatcacatccggatgacggagacgcagatcgtcaagccaatccacatatgcgcggcaatgctcgagcaggccatcgccaacggactcggcattcaaatcagtgccgacgccgggaatggtgttgtagtcgaacttgaagaacaccgcaccgaaatcgtcaatcaaacgatcaacagtacgcgtaacatgctctcgcgcttcgggagaacggaaatcaagcagataacgacccgaatcgcacacgcgaacaccatgacgctggaagaacgcggaatccggcaacatgctcgcaagcggcgatttcacgccgatcacttcaggttcgagccacagtcccaagcccatgccatgagcacgaatcgtgtcggcaagaccgcgcagaccggcgtcgccgaaacggttggtggaggcctgccattctccgaccatgtcccaccagccgccgtcggtgctgtcgtaccagccggcgtcaatgcagaaaacatccgcgccaacgcttgccgcaccttcaatcagcggcagttccttctcaatacgagggtcaccgaacagcgtattcatgtaatcgttgtagatcacaagaccctgcgtatgctcgaactgatcgacgcgccccaactcacgagccttggcaatgcgcagcgcacgacgctgcaacgtcatttcggcaacagcctgctgccaatcgcctgcggcaatggcaaacgacacaggaacggactcgaaatcattgccttcaccaagattggtgaaccaaccatgatccttatattccggaccgaacgcagtgacgtgcagaccgggatcgtcctcgccgacttcccactcccacggaccgttatgctcgatctgccacattacggaaaaatcgcgggcgcggcgtaccgaaccttccacctgcagaatgccggccggctcatgctctcccgagctccatgtagaagtcgagctcatggcaaaacgcgaactagactgaccaggattgattttctggttgcggttacgcacctgagtgtcacgcagcggacgaacacgccaatcgttttccacagcccaagcggcatcgccccagaaaatattcgaacgatgcaccttgccgcagttgacgcgcatcggaacggtcagattcaacgatgacaccgcttcaatcggcagttgcctggcggactgcagacgcgtgtaggtgcgcactgcggaaagattcgggaacgcctcgaatacggaagtggccaccaagcctgcattggaatcggcggaaaccgcctcggacgcggaattcgcggcggaatcggctgcgtcacgttcgcttgccgtcggctcgaattcacgacctttcggttcaagatcggcatacggcgcgaactgcgtgatctccaaacggaacggatcggcggaacctggttcaggttcggaagcaagcgcggaaacgaatcgcaattggctgccggcaactgtggcaatcaacgtcagtcggttgtcttgcgaaccggtattggcggcacacacctcaacaatcggacgcggatccttttcaaccactggctttccatcgtcagacaagcgaccatcgatcggaaccatgttgcgccctacaacgttgcagaggcgaacgggggaatcggcggcaatgtcaaacagcatggagaccacaccattgccccattcaaggcgcccatcctgccgaggaacaaggggagtcatattgccgttctccattgccatctccttcgaattccgaatgccgcctatccgttgacgtgcatcgtttgacgtaccctcactagcttaagcggaaaacggggcaaccgcgatgtgcgtgtctacgcacattcagcaaatattcagcaactgaaatgaccgttcgaagaccagcaaatacctactcgaattgcagatattccacgaattgaatcggcatatccttggattccgtgatattgctgaatccgagaataaccccttctttcggcagtcccttcatggaagtccatgttttcgaatgggacaagtcgaatccgacagcgtcgttcacatcggaaaccggattgcctttggcgtcgaccagcgcatccttgacctgctcaagatcggcggcactcatcacttccgcgggtttggtgatgtcgccgcgatcattgacttcggcgaaaatatcggtttcggcaacaatcatgttgatctgacctgccgaaacgcgagccgtcaacgatgcggaaccatcttgcgcggcattctcgctaatcgcaatggaggcatccgtccgcacgagacgctcgtcttcaataccttgcgtcttcacaaaatcagcgcccaacgcatcaatctgttcggaatattccgccatatcgacaccttcaagactcagctcggcctcgggacctttggtcacatacgagatgacgaaagcaagtaccaagccgaccactgcgataatgatcagcacatcggtcagaaagttctgcttgaagtacggccacttgtctttcggcggcaactcgcggaaggttttgaatttcgattgcttcgcatacacgttggtggatgcgagcgctgcgaccgcatcttgctgctcctgggtgagaactggcttctctactgccataccaaaccttcccgcgttgtttcatcgacgcattcacgcgtcatcttcgtgcgcagcaacatgcgttgctttctcacttccctatcttccgcctcgtacctgataatttgcggctagccgccggccgaaaaacgacaagcggctagcaggaaggctgatttcaagccaatcagtccaagccctaatcagcccatttagaccttgatcatggcgtattgggagtcgtagaggcgatagtaggcgccacgcttggcgagcagctcggcgtggttgccttgctccatgatctgcccatgatcgatgtagcagatcatgtccgcgttctcgatggtggacagtcggtgcgcgatgatgaagctcgtgcgtcccttcagcaggtggttcaatccggcctgaagtgcctcttcggtacgcgtatcgatattcgacgtggcctcgtcgagaatcagaatgcgcggatcggccagcagcacgcgggcgaatgcaatcagctgacgttgaccagcggaaagcgtggaaccgcgctcctccaccaccgtgtcgtatccgttcggcaaatccataatgaactcgtgcgcatgcaccgccttcgcggccgcttcgatctcagcatcggtcgcatccaacttgccgtaacggatgttctcgcgcacattgccggagaaaatgaacgtatcctgcagcatgacgcccatctgccgacgcaacgattccaatgtgacagaacgcacatcatgaccatcaattgtgaccgaaccttctgcaacgtcgtaaaaacgcgacagcagattgataatcgtggttttgccggcaccggtcggaccaaccaacgcaacggtgctgcctggctcaacatgcagatcaaccagattgagaatattgcgaccgtcaggctcgtaacggaaaactacatcgttgaaatcgacgcgtccttcaatttgcggcagttcagtcgcgtcaggagcgttacgaatctccggctgcacgtcaagcgtttcgaaaatacgctcaagatatgcggaacaagtgatcagctgattgtagaaattgccgatgctgatcaccggattccagaaattattcgcatagccaacgaacgcgatcagcacgccggtggaaacgttcaccgcgccgaagcccgtgacgcccacatagtagatgaatgcgatcgtcatgacggaaatggtttgaatgcccggccacatgaggaactggatatgcacggccttcatccacgaggtgcgcacgtcgtcttgctgctcttggaaggttttgaactgcgccgcctcctgggcgaaggtctgcgtggttttcacgccggcgatcgactcgtgaatgaacgcgttgagattgctctgcttgttcgacaacacctgatacgcgcggcgctggaaatgctgcaataccagcacccacgcgatcaggaacgggaagagcaccaggctgaacagcgcaagccgccaatcgaccacgaacatgaccaccagcgtgatcaggaaggtgaatacgtcggaaatcacattgatcaggccggaactcaacgtgtcggaaagcgtgttcacataattgaccacgcgaatcaggattttgccgtgcggacgcgaatcgaaatagctgaacggcagcgtctgaatatgcgtgaagatatcgcggcgcatgtctttcaacatgagctgaccgacgcgagtaatttcgacggtacgataacgcaatccaaactcatacatcacaataagtacggccatcaaccccgttaattcaccaagtaaggtgagatttttcgacggaatcgcgctgtcaatcatgattttcgtcaaatatggcacgactaccgcaatgcagctcatcatgacgacgacggcaagaatgcgtatgattcgcgacatatacggctttacatagacgccgatgcgcagaatatcatgcaggttgatctgttcttccagctcttcatcttcgcggtatgtgttacgttttgccatgggttttccccctttcctgctttcccgcgcctacgcttcgaaaccttgcgaacgacccgcctgcaagccgagctgcctgtagtagatctcccaatatcggccgtgcgcggccaccagttcgtcatgcgtgccgcgctccacaatgcggccatgctcaagcacgaggatcagatcggaatctttcaccgatgaaatacggtgtgcgatggtgacgatggttttctgttcgtccagttcgcgcagatggcgctggatttccgcttccgtttccatgtcgacggcgctggtcgtatcgtccatgatgaggatcgacggattgtcggcgagcgcgcgtgcgaggctcaggcgctgtttttggccgccggaaaggccgacgccacgctctccgaccacggtatcgtagccttccggcatgctgcggatgaagccgtccgcgccggcgatggtggccatgcggcgaatgtactgttcgtcgtattcgcgttgttcgcccgcgccgaagctgatgttgccgccgatggtgtcggagaacaggaacgtgtcttgcgccacgacgcacacttgcgagcgcagtgtggcgagcggccagtctcgcgcgtcgacgccgtcgatgagcacatggccttcggtggggtcgtagaagcgggaaatgaggttgacgagggtggatttgcccgcgccggtttcgccgagaatgccgagtttggcgcctgccggaacatggaaatccacatcttcgagcacgggggtgtctggttcgtcggggaaggcgaagctgacatgctggaagtcgatgctgcctgcgatgcgggttgtgttggttgttgcagcggttgcagccgctgtgctggcgtgattcacgtcgacgctgtctcccggtttttccgtattttccggcttttccgtaatacgtgactgagcggtgagcagtttgcggattttgatgcaggatgcgttgaatcgctgccagtcgttgatcagccatccggattggcgtaccggcccgtcgatcatccacaggtaggagttgaacgccacgagattgccgagggtcatgcgcccggtgatgaccaggaatccgccgaatccaagcgtgatcagctgcagtgagaagccgagaccgtcgagccatggcatgtatttgcggctgttgtaggcctggtccatgttgcgttgcatgtaatcgtcgttgtgtttgtcgaatttttcggtttcatacggttcgcgcacgaacgctttgaccacgcggttgccttcgatgttttcttcgaccattgagttcatttcggcaagcgagttgcggatggcgaagaacagtggtcttgcgtgcgtggagagtccgcgcgtaaggatgaaaatgaacggcgtgacgcatgcgagcgcgagcgcgagccgccagtcgatggtgaacatcatggcgagcgcgccaatgaacatgaccacgcagtcaagcacctggtagctcacccagctcagcgcgtggcgtatggcatcggtgtcggaggtcatgcggctcatgatgtcgccggtacgcgtgtggttgaaataggtgaagtcgagttcgtgcagtttctcgtattcgtcgctgacgagacggaatacggagttctgcccgaagcgttccatccacatttggtagccgtagcgcgaggcgacgcgcacgatggtgaacacgatcatcatgatgcacagtcgcgtcagttcgtcgacttggccttgcacgatgacacggtccacgatgaggcctgacaatagcggaatgatgagcgccatggtgttgttgacgcagaacagcactatcgcgccggccactcgtggcaggtcgggtttgcagtatggcaggatccatttaaggttgcctgcttctgtattacgattcggatcgacgtacatacgtagcgttccttcggattgtttgctggttgtttgggttttcgtgggttggttttgcgtttttgcgttgcttttacggccattcgttgccgttacgattcacgtccgtcgtttgtcgagcgtcccgttgccgtctctctcggtcgaaacccctgttcggattcgcaaacgcgacttattctatgcgaaccgttttttgatgcaacgtgagtgatttcggcgtgtcgcaatcgcaataaaatcaacgcatgtaccgttacataaattcgctctggacgtaaaggaatatgggtgatcgcagtagcgctttctatatcgaaccggtacgatatatcgaggtgcggcattccgatgacggaacggccgcaatcgcatgaacatcatgaaaggacggcgtcgatgacgagcacacagaccattgaggaactcagcgcacaatgcgcggcaaaatatggcatcacccgtgagatgatcgaccatgcggaacgttggacggaaaccgacggcgatctcgaaggcctttccgaagagcgcgtccgcggcattctcgacatgcgtttcggcgcgatcgcggttgacaccccgcgttccgaactgtggcacacacctgacacaatcgacgtgatcgaagatattccatacctgcctgacggtggctacgatacggaagccgggcagtgcagaggacatttgctcgacctgtatctaccgcacgatgcggtgctgcgctgcgggcatacgctgccggtgtacatcgatatacacggcggcggtttcacttacggatataaggaattgaaccgcaacttcaacgtgcatctggccgaaacgggcttcgccgtattctcactgaactaccgaccggccccgcaaaccgatttgaggggtcagctggcggacgttcaggcggcattgcgttggatcaaggcgcatttgactgattatccggttaatccgaacgccgtgttcctcaccggcgattcggcaggcggcgcgttgaccatgctgacgttggcgattgaaaacaatgccgaagccgcggccgcattcggcgtggatgagccttcgggcattggtttcgccggtgccgctccggtgtgcggtgcctacagttccgcatcgttggaaaccatgggaagcgaactgaccgtaggctacgatccgaatcgccgcaccggactcgaacagatgctgggcgtcgaattcttcgacggcatcgaagccgccgacccgaagttcctcaccgccgaaggcctggcgttcaacgtcaacctgccgccactgttcatcgtgacctgcggcgacgatttcctcgaggccgacaatctggcgcttgctgccgcactggcccgcaagggagccgatttcgaactgttcgacccgaagccacgccgccacgaaacgctcggccacgtgttcgtgatcggcatgccatggcttgacgaaagcgtggaatgcttcgaacgcctgcgcaggttctcgtacgagcgctgctgaatcacgaatgcctgcacgcgaccacgcataatcaccagcatcacaaacggccgaccatgcattactcacgcatggtcggccgtttgtcttgcaactcttttcggcaaaatcgcgaaacataaatcgcgaatcgcacgaatcgcatgaatcgtgttcagaaaagaagaaagccggcggaaagaagggccgccggctgagagagaagagagaagaagggttcagttatggggttcttcaggaacctcgccagccgccgtaactgctgacatgttctatataagcgcccgagtcttggaggaatgatacgtgttcctgccaattagctgagaaaaatgtatcagacatgtgagcggccatacacattcgtgaattccgtcgaatgatcgcaacattacttccgatttgcccaatcgcacgtctatatcactcacccactccgcaaaaatcatccatttcaccggacgatatgtcgagctcaagatgctgccgttgtctttctcggaataccgaaatgcattgcaaccgacagcaaatgacaatgcgctgttcgaccggtatctcacatatggaggtctcctctacgtcacacagctcaccttggataccatcgggctcggcgactaccaagacattcgacaccgcaacatcctcgactggctgctcgagtaggacacactctcccgactgcacaatttgcgtccacggatcacaaggtacgaaaaatagcgggaccaaatagttcctgcataacgtgcgccgtgttccacctatgatggatatatgaaacatttcgaatatgaaatctccggcatcgacggcagcgcagcgaaattcgtcggatattgccttgataacagcgaagaagtcgttcccgaccgtgtgcgtccgtctgtgcttgtgattccgggcggcggttacgaaatgacgtcggatcgtgaggcggagccgattgcgatgcaatttcttgcggccggtttcaacgcttttgtgctgcgatattcggtgaagccttccgtttttccagttgcgctgttggaagctgccgatgcgatgacgatgattcgtgagcatgccgccgagtggcatgtcgatccggatgcgattgccgtgattggcttttccgcaggcggtcatcttgctgcgaatctcgccacctccaccagcgacgatgttcttgtcgctcatggttacgatccggatgcggtgcgtccgaatggtttgatgctcgcctatccggtgatcacgtctggcccgctcgcccatcgcggcagtttcgattcgctgcttggtgaacgccgcaacgattcacaagcacttgaatccgtgtcgatcgaacgtcatatcgacgccaaaacaccgccggttttcgcatggcataccgttcccgacgaaaccgtgccatacgaaaacacactgatgctgatcgacgcttgcaagaaagccggagtcagcatcgaagcgcacctattcccgcaaggcgggcatggactgtcgttgggcactgcggaaaccgcatggcagggcgtcaacggcattgaaccgagtatccagatctggccgcagctggctgtctcttggatgcgcagaacgttcgcacgataatcagcgcagcagacgccgtgacatctaaccccatctagtcacgtttcccgcctgcgcaacccgcaccctgcatctgcacaacccataaaatcgggttaaaacccgggttgtgcagacgcagaacgcaagtcgcgcagacagcacaacacccccgaaccgaccggataggccgaaaatcataagcttgggggcaaaaatcagcggggctgacggaagcgacgatcgccaatcggatcgaacggtgtatgcggctcgagctgataccagtacgcgacggaagcgacgtcgtcctgacgctcgaaattgccgccctcctcggtaccgatctgctgccattccacacgcaaatcatgttcgaaataaatcggatcgggaatgtgccagcgatacaatccgcgggtcaccggcgtattcacatcccaatacgcgctctcgcgatgcgaggcgagacgctgcgaatagaacgggaaaccgacgtacggcgcacagaacgtctgctcatgcatacgcccatgctcgtcgaaatcggcgaaactccacgcgccaccgaaataatcctcggcaccggtgctgcaccacgtgggatactggtcgtccccatcgatgtacatcttgacttcaccctcgccccaccagcggctttccaacgcggtgagcgccaaatacgtgccgatatacgcgccacgaccatgcacgccgtcgagcaccacatagtcgcgggccagttcggtgacgcgctcgcgacgccactgcgcatgaaaacgcatggtgccggccggaagcgcgtcatattcggtgtagtcgatctggtagaagaacgcgggaacgtcttcattgtgatcgttgcggagcacgatgcgcgcatgttcgaacggcatggagaagtagcagttgaagccgcgattgggtacggccaccaccggcatcgaattgactcggcaggcctgcgcgtggccgcagcagaaaaagtcgccgatcgggcattgcacggacggggtctcctcgccatcccaatagaattccaggatcaggttacgaagcacgttcggaccggtagacgacgtgcggtcggtgaccgtcatccaaatatgacggatcatgcccggaccgtccacatccatcaaagtgacgctctcccccgcttttacggtctggatgcaggggctgcctttgcgcgacgggccaagtgcactggctgcagtggccgcagcgcccttgccgcccgtgggattctcggcgttcacgcaacgtgtgcgccctggtgccacaaccgccagcgagtccagcggactgcgcgcggcgaacgcacccgacgaatcgacctgcatatcgtgatataagctttgctgcataacgctccaatcgttattacgttgaatcatcggcgccccttttccttatactttacggcacccacaacagtgcctcacggagattcgactcaaacacgtgacaagattttctgctacacggctttttaaaccccgactgacgattttgcaatttcgtcgcacgatttcggtttattaaccgcactatcccgattcccgtcatacgatttctagccctgtcgcacgattttgatttgctgaccgcacgattggaaaatttacctttatttcggaatcgcgcggtcagatttttgaaatcgtacgacagtcctttcaaaaacccgaagaaagtgcagaccgacacggggagcacgctatagcgggcgggactcgtagatcatttggcggtcgccgaagtagagggcgtcacgccaagaggccttcttgcgggccgcctcctgctgaggctccttgatcggcacgaagaaccaacggaccagaccaaccaccatgtcttgcacggaatgccagatgccgatatacgcggtcaacgcccagaacgtcacgatcgcattgaagccggcgaacaccgcgttgccccaattgtgcgaaagcgtatcggcgtagaacaccatgcacgagtaaatgatgatcacccacggcatcgtcacatacaatgccggagaagcggtacgattattgactttcggcgtacgctggcaccgtatttcgtaacggccgaagcgcatcgcctcaacatgagcgtgcagctgacgcttggagcagttgactcatgagcagccacagccgcgttcgcgcatctgccattggatttcgcacgattcgacaagacggtggttcgcgatttccgtacgcctcgcgcaaagcagatcatgcagcgcacgctcgagatttcgcgcgacaacgatgcgttccatgtggtgttcgatggcgtggagtccctggaccaggttgagttcatccgttccatcggaggcacgctcgccgagggcacgctgttgagcaacgccatgagcgccaacgagttcctcatgcgcctcgaaaccatgggcacttcattgcccgaagccgccccgaggcaagctgagtaaagaggagtctcgtttgtcgcacgattgcttcatctcgtgaaacgcttggaggaaatatggcgagatgggagcatgtgtgctaaattaattagtaaacatgtttagccaacgatggctttgaggaggattcacatggccactatcagagagatagcgaaacgggtaggtttctcccaagccactgtttccagggttttgaaggacgatcccactttttcggtgaaggattccacccgcgagaagattctaaacgccagtctggaaatgggatacaagaacgtaccgcaataccagcgcatcaccattccgcaggatgttgcgattctcgacaatgtcgtacccgacaagggcttgcaggacgcgtatttcgacgagctgcgcgaagtgctcgtcaagcatgccgaagagcagcgtatgaacgtgaccatgcacgaggacgtggattcgctgatcgccgatgccgataaatacgcgggatttatttcgatcggcccgtccccactaaatcacaagacgcttcaccgcttgcataagaagctcccccacggcgtattcatcgacatcaatcctgcgccggcattgttcgattcggtacagccggatttggaacaaaccatattggatgcgatcgacgcgcttatggggtcgggttgctctcggatcggcttcattggcggcttgggcaacattatgggcaagcatgaatatccggaagatattcgtacgttcgcattccgcaattgggcgttgcgtttgggcttggacgtgcagggattggtgtatgcggacggcccgttcactgtggaaaatggccgtttgcaggggcgtcagttggtgcaggatcatgctgatgatttgcccgatgcagtgattgttgccgccgatccgttggcggttggcgtgctgcaggcatttgccaccgaaaatgtgatggtaccgcgagatatcaaagtaatcagcatcaacaatcaggagatcgcgaaatacacgtctcccgcattatcgtcgtacgacatcagccaggacgaacttgcgaaagccgcagtactcatgcttgccgaagcactgaccaccaaccgcaaaatcagccagcatatgcgaatctccaccagtctcgtcgcccgcgacagcttcaccccgcaagactaaatataaaaacttgagatacggcaagggccggcatcctgttgcggagccggccctgcaattacgtttcagcaatcgcacctcaacgaaggaggtgggcgtcgcaccagacgtgttcggcagcccaggtggcggggtcgagcagaagcacatcggcagcatagccgggggcaagcagaccgagaggttgcttggtgaccgggttcgcgcggtcgaaaccgaatgctttggccggaatcaacgtggcggcctccaccgcgtcggcgggcgtgaatcccaattcgagcaccgcacgctgaacagccttttccaacgtcaacgtggaaccggcaatcgcaccattcgatgcaagacgagcatgaccatcaatcacatccgcatccaacgcacccagcaaataatgaccatccgggcaatcggtggcagccatagcgtcggtcacaaacgcaatgcgatgcggcgcgaaaccgaatcccaaacgcaccatcggatcctgcacatgaaaaccatcattgatcaactcgatagtgacgcgtggatcctcaacggcagccggaatcggaccaggctcacgatgatgcaagccattcatcgcattgaacatgtgcgtcataatgccagcacccgcatcaaaacccctgcaggcggttgcataatcggcatcgcaatgtcctaccgcaggaaccactcctgccgccacgaaacgacgaatcgcatcaatgccgtgcggcaattcgggggcgatggtgatctgccgcaaacagccgttcgcagcatgcaaaagccgatcaacatattcgggaagcggatccttcaaacattccggatcatgcgcacccttgcgagacagcgcaaggaacggtccttccagatgcgcgccgagaatgtcagggcgggcacccatcatgccatgcacggtttgaagattggcgcacatcacgtcgagcggattggtgatcaaactgagcacctgacgggtggtgccgtgcatcatgtgacccgcacgagccaaacgtatgccctgcacgccatcatcgaaggaactgccccacgaaccgtgcgcatgaatgtcgacataaccgggagtcatcatacggcctgcagcgtcggttacggaaccggccgaaccggtcatggcattgccgaaatcagccgaactgaccgaatcgggatcagcagcggcatccaaaccgacgcttgcgcaagccgcagcaaaatcatcgtcccgattcccagtcgcaataatcgcgctaccatcggaaaccagccaataatgttccgcaacacctcgcgcatcgactttgcgcgcattgcgaatcgcaaacggacgggccgactgcgccaacgcaacgtccacctcattcgcaaaccgttcccgagactgttccatattcaaaccttccgactcactcacagccatattcctcaattagcatccaattcttccagtcagtggaagaattaccccgctgacaagcccatcagcaacccaatccttccagtcagtggagaaatcctcccgctggaaggccgaaaaacgtccagaatgttccagcgagtggaagaatccggacgctagcggacaccgactgcggagcagcaatcagatgcgctgccaggcgggcttgtgggcgtaggcgtaacggtagtagtccttgtggcgtaggcggctcgcagcctcttcgtccacaataatggtggcgtgcggatgcatttgcaacgcggacgccgggcagaacgcgctcacaccgccctccaccgtttcggccacagcttcggccttgcctgatccgaaggccagcagcaccaagtggcgagctttgagaatcgtgccaatgccctgcgtgatgcaatgcgtaggcaccttgttgatgtcatcgtcaaagaatcgggcgttgtcgatgcgcgtctgctcaaccagcgttttgacgcgcgtgccagaagcgagcgacgatcccggctcgttgaaaccgacatgtccgtcggtgccgatgcccagaatctgcacgtcgatgccaccggcttcttcgatcgccctgtcgtaggcagggccggcagccgcaatgcgttcgccgtcgctcagcggagccccgtcaagcacgtcaccaggcacgtgcaccaaatcagggttcagtccaagcggttccacaaccgtacggtgaatggtggaatggtatgactgcgggtgatcaagcggcaatcccaaatattcgtccaatgcgaaaccgtgcacctgcgatacgtcaatatgctcactgtgcacaatgcgtgcgagcgactggtatgcggcgagcgggctggatccggttgcaagtcccagcaccgcgttcggcttagttttaatgagatcggctactgaacggccgtaaatatcgcctgcttcgcgctcgtttttcacgatgatgacttcggtcatgatgttcctttcattgaacttggattgacgtttttgtttgatgatttatttgatgattcgtcgaagctcgtcggctgctttccacacggtttcctgaatgcgatgcagttccgacggctggctcgtcgcgttccattccttcgcataggcctcgcaccagcattcgagctcgcgtgccagcgtacggtaatcggaaggccgccaatcgccagcgtcatgcgcatcacgcacgtcatgcgcttcggcgagcgcgaatcccactcgattgagcagcagctgcccttccatggcgatgcgcacggcagcagtaatgcccggatttcccatatgtgccgcaatcggcgcgatgtcgaccatgcattgttgcaatgtacgattggcttgcggaattcgttcgattgtcgttgccatattgcgcatcatgcgattgcgcgcttcacgcacagtcattgcgtttccacagtcagataaatgatcaaccaagcgatcggccaggcagggaatggtttgcgcaacatcggtattgcagtttcccgtgccgtcatccaattcgagatattccacaagctcacgccaagtgaatacggcttgcgcggaagcgttacgaagcaatgcaacgaatcgtgcgctgcaatcgccatattcgacgcgcgaaatacgctcaagcaagtcgttttcagcactatctccagtactgttttcagcggtatttccgtcagtctttccagcactatcttctacgggattccacgcatattgtgcaccgaatatcatgccaggcacggccatgcgcggatcgttgacatgcccaaaatcgccccaatcggtgacgagcatgccttccgcaccgcagtcaaggccgtagcgtgcgatgcgcgcgatgttgttccacgcatcgtcgatgcgcgggagcagcgcattccacccccatacggccgggcatacgatttgtttggctccggctttcgccacaagttggattttctcatcggttgcttccggatcgtactgccagttcagcagggtgacgttgttcggcagagtttcgagaatttccggcatttcggtggcgatgtctccccagaacatgggctcgtggccttgctgggacaggtgttcgcagagtttgcccacgtatgttgcgtacagcgttgcgacgcccacacgttgcgcttcctgcttcgattggcctttgccgaggtcgaaggtttcgtctgcgcagatattaaatcgtttcgtgcggaagagttgcaggtacgagtcgaccagttgcgtggagaacgcgaacgctcgatcgtcggcgacgttgagtgtgtggtgcctcatgcgttcgatgaagctgaacggccggtcgacgtcttcggggaattcgccgagttcgcgcagttcctgcgtgcgcatcgcaacgtattgatggccgaatgtggagactgacggcacgagttcgatgccaaggttcgcacagtattggtcgaattcaagtatgtctgccggcgtgagcgggcttgaaccacgccatgtttcgctcatgccgtcgaatgcaaacgtatgctcgatgtagagctgcaattggttgtatttgtagaggcagaatttgtcggcccactgtttgagccatgtgagcgttggcacgcggccgcgcgtcgcatccaagtaatatcccctgacccgatatgcgggagcatcttcgatctgcagtactggcagcacggcaccgttttgccgtatgagttgacgcagggtctacacaccgttgcgcacaccctcgaaatcgtaaccggtaatcgcaataccgtcagtatcgataatcagcgtatatgcgccgggaatgccagcttcttccgacgcgtccgaatccgcaatatgcaaactgatgaatccaggccacatacaacccgtcgcgtaatcccaatcaagccctgttgtggcacgtatgtcggcaacaagctgacgtgcaagcagataatcgccatcgccaatcgcaatggattcgttcacgcgccccgcatagggcaacagcaccgtgccttcgccgaccgtcatgctgttcggttcgggaatgatcgcccatttgcgggtgttctcgcttgccatcgattcgcctttcgattgtcgattatcgatttcaattctcgattgtgattctcggattgccgggattgccagatctggatttccggaattgttgcgcttgttccagtctgcctgaagtatcacgcattcacgattgcggttgcgctcgttttgccgcgagcgccgcgccgattgcgccgattggttggtcaatggctgcgattctgatgttcgatgcgatgtcgagtgtggtcaggaatcggcatccttcggctctgcggctcagttcggcttggatgacttcgatgagtgcgtcaccggttttcgccatgcctccgccaatgatgatgcgttgcggatcgtaggcttgcgcgacgatttggatagtgtcgcccatggcgtgggccaccatggcgagcacgtcgttggcatgcccgtctccttgccgcgctttgcggatgagatcaggcatgggcgggtttgcggagggccaaagttttgccacggccccgccggatgccacggtttccaagcatccacgctgcccgcatgggcattcgaatccgttggggtcgatgggtaggtgcccgatttcgccgatggatccgctgtacccgtgttcggcttgcccgccgcgcacgagtcctgcggccagtcccgtgccaaagttgaggaatacgacggttgcgttgccgtcgacttgttccacgaattccgcggctccgaccgcagccgcgttcacatcgttttccacgtgcaccggagcgtgcataatctcactgatgcgttcgccgagttccaaggtttcgatgccgagattgacaacgttgcgcacctgtccagttgcgcagttcacctgtcctggaatgccaatgccgatgggcaacggttcgttggagagtgtacgtgcgacgcgcacgatgtcggttacaacgttgttttcgccggaatgcgatgacatacggcaaacgtcgacaacgcggtctgttgtgtcgagcagcacgccttcgatttttgtgccgccgatgtcgataccgatgcatccttgctcacgattattgcgatgcagtcttgcgttcattgcatatacctgcctggaataggataggtgcccggattgcggttgttccgttgtccgggcacccggcgcagcatttacgccacgcacggagttagatggatacctgtcagcccttgaccgcgcctgccgcaagacctgcctgccagtagcgctgcagaccgaggaagagcacgattaccggcagcacgccgagcagtgcacccatcatcagcgatccgcgatcgttgaaggtggcgagcgataccatgccgtacaggccgagcgtaaccggcttgagggtatcggaggaaaccatcaaacgctgagtgtgggatcgcatctctctccttcgtgaaatcattccgacacctcatcgcgccggataatcacagaatatatatgcaattcctttttgtcaagtttccttacatttaaatcagaagcaagctataaacaatgccaaagcattgcaattcagccaaacatagagtattcacaaaaagacagaaatgcttatatttgcatcacacaacagttttcagtaatgcttattaacaataaatacacaacgaagcatccgcttgcatcgcggcgggttagtagctaagtaaattagatggccctgcaccagccagtgttctccaatttacatttgacggacatcgacttccccattaagagacgccactctgggagatagacacgcccctgacattgacttcatgttcacactcaaccagggtaaggtcgagcgtgaacatgaagtcagcttgagtcgattagagctgaatcacgactccctcccaacgagcgagctcgccgcgagcgatcgatttcacgctatgcgcaacatcataagtgctgagcagtatttgcgattccgcgacgccatcgccgagcagctccgccacttctcccggcaggccggcggatttatcggtgagattgacgatgacaagaatcgtgtcgtcgccgctggtacgggtgaaggaatacacctgctcgctgtccgccgcgaccagattccattcgcccgtcgcgatggtcgcgttgttgtggcgcatggcgatgagcttcttgtagaagccgtacacggaatcaggatcgtcgaattcctcggctgcgttgatctcgacatgattcggattgacgccgatccacggttccgtcgccgcgtccggcgcggtgaaacctgcgtacctggaagcatcccactgcatcggcgtgcgtgcgttgtcgcggccgatgagcgcgagcgccgccatcatcgattctgcggactggcattttgcttcttccacgcgctggcggtaggcgttgatggattccagatcgcgatactgctcgagcgtggtgaagtgtgcgttggtcatgcccagctcttcgccctcgtaaatgtagggggtgccgcggtgcatgtgcagcagcatgccgaacgccttggcgctcagctcgcgcgactcgcggtccgtgtcattgccccaacgggacacgacgcgcggctgatcatggttgcagaagaacaggctggcccagccggcatccttcacagcctcctgctgcgcggcgaggcgggcgcgcaggttcctgacttcgaacggcacggtgttccacttggaaccttcctggtcgatgcccacgtggtcgaagaggaacagcatgtcgagttccctgtggtccggatcggtgatgaactcgtttcggtccggagtgatgcccggcgcttcgccgacgttcatgtagccttcgcggccttcgaacacttcgcggcgcatttcggcgaggaattcgtcgagccgcggaccatcggaacagaacgggctcgcgttcgtgtatccctcttcgcctatctctccctcggacagttccgagtcgacctctccaggcagccgtccgtggctatcgagatgtttcgagatcaaggtgatcacgtccatgcggaagccgtcgatgccgcgatccatccaccagttcatcatcctgtacacggccttgcgcacctccggattctcccagttgagatccggctgcttcctggagaactggtggaggtagtattcgccgcgcttcggatcgtactgccaagcggaaccgccgaaatacgacccccaccggttcggctcggcgcccggagtgcccggctcgtggcccggcctggccggacgccaccaataccagtcggcgtgagggtcgtccttgtcgcgggaggcctggaaccaggcatgctcgtcggacgtgtggttcacgacgaggtccatcacgatcttcagaccgcgcctgtgcgcctcggcgagcagctcgtccatgtcgtcgagcgtgccgaacagcgggtcgatgtcctggtagtcggagatgtcgtagccgttgtcgtcttggggggacttgtagaccggggacagccacagcacgtccacgccaagatcagccaaataatcgagacggctggtgatgcccttcaggtcgccgatgccgtcgccgttcgtgtcctggaaggaacgcgggtagatctggtagaccaccgcgttggcccaccacgggttcggggtcgcgccgttggaacgcacggcgtcgggaaggacggaacgattgaaatcagtcatatcttgtttccttattaaatcaagttcttcatcaacgcgatgctatggatccacgttgcctatatacgggatgaatcaatgttgctttttcttttccctttagagttccatccatgagccgaacaagcatgctcatgcccagttgacacaactctgctggcattaagggaaattcatctatcctcagacgcttgcctatggaatctgtatatgttcccgctgaaatcagcgaaagatcttgaggaatcttcattccacgctgccgcgtcgcagcaacaagattattaaggaacaatgggccgccttgagtcacaattgccgtgttctcactcgagatgaacctctcaagtaggttttcggcagcatcgaaatcatcctcgtcggtaaactcttcatctatatgaatcttgtatcgcgcagcagcatcatgcattgatgtcctgagtcgaatgaggtaatttgcacctccatttcgttcgtaatcaatctccttcccccctgcaaacagaattctgctgtgcccattacgacaaagcgtttgcatgatcatttcacccatttcaataaaatcggtatcaatgcatggcacatttatttcattcataggatgtccaatagaaatgagcggaatacttgaaagctgagctaattcaattcggggatcattcatagtcacatccataagagcgacaccatccaccatcccagtatcgatgatagagcgaagctgctcatctcctgtttcctcagtcaacagcaacgtttcatagccaagttgcctggccgctttgagaaaatttagaaaataagcacaatagttggtatagctggtggaatcatggacgggcgaactcagcgcgacgaaatgagtctcaccactcaacggagctggaccaccgtttttcgccaagtaaccaagttcccgcgcagcttgcaatactctccgacgggtatttgcccctatgggacgtttccctgtcatcacataggaaaccgtgcttatggaaactcctgcgagagccgccacgtccttgattccagccattgttatccttattcgttcacagtaaagccttggctctttccttgctcaacgagcttgtcctgccaagccttcacaccttccttcattgtggtctgtcccatgtaagccgccccgacagtgtcggtgaaaacgcttcgcgcataaacgtcatagggcagaaattcgaacttagatgtgacacgcttcgcagcctcggcgaattcagcattgaacttctcaccgccaaaataatccaccgtgtctccatcggagttcaccatagtagtctggctaaggaatttatcgttagacatggtcttcaaatcagcaggaaaaccgccttggtccacacgggacatgatggcatcagaattagtgctggcaaattccataaacttgtacgcagcatccgcattcttggatgacgacatcagggcaagggaggagccgccgcactcagaacttaccttctcgccggcgttccacgttggcatttgagcaattcgccactttccagcaccctccgaagcattgtttaaaaacatgccgggagcccatgcagcagatatcacgctcgcaaattctccggaaccaactgaacgataccaatcatcagaactatcttttgtcttcgtttcgattagtccttcatcaatcatcttttgccagaagtcacagaatttctgcactcctttatcagtagtgagtttgacggtaaccttggtgccgtctttagatgtggaatatgggtgtccacctgcttgccagaccattgcattgaagaatccggcgttccctggatcattagcaatatatgaaccaatctgcttaatcttctttgcatcttgatagaactcatcccaagtacttggcggctcagaaatgccagctttgtcaaatacctctttgtcatagaaaaaagccattggtccagagtcgactggcataccatacataccgccattgaaattcactgcattccaagtacctggggtgtagaaatccttatatttggcagtcccatagtcattcagatttttaagagagcccttaattacatactcaggaatcgcaaaatattcaatcatggctatatccggaattccactgccagcttccaaagcattattcagagctttgtattcatctttactactaccggcattggtaaatttgatgacaatgttagggtttttcttcatgaaaaccttagcattagctttaagattgttatcccaagcccaaacattaacaaccgtcttaccgctcccatcggaagtttccgactgagttgttccacacgctgccaatggaacaaccatcgccgcagcaccgcagagagcaattatttttcctaacgagaacctcattgtttcccttctttctattgagcagcagtggcatgatccttgcttttggcgcccttgcttgtagtctgcatcttaaaaaccgaaggattatgactgacaaataatttcgatgatttcgacgatttcaataatcaaggcactcaccagaacagacacgcgcggctgcatcacgcaatggccaacacaattgatgatccattgtctaaagaacgagaaagtcacattagcgaatatagtgctgtcccaaggaatgtgccgcgtctaaaagcacatacatcgtcatatgatcggacacttcaacgctttactaagaagtcaacacagaccgggaaaacctataacgtaaatcaacagcgatgtcgccaataacagctctgctatatatttccatcaacaaattgcctgaaatatgtgccaaattgcaaccccggcggttcagctatcatgcgctgaaccatcaacttcgtaggccctcacacgacgcagtcgcgcgtgtctgttctggtgagcgcatcgattattgaaatcgtcgaaatcatcgaaattatttgtcggtcataatccttcggtttttaagatgcagactacaagcaagggcgccaaaagcaaggatcatgccactgccgttcaatagaaagaaaggaaaaagaataccatcgggtgtcctcgaaggcatggaccgtaccgcccgatcatcgaaatctgaatttcttcagtccaacgatcggggtgcgattcatcaaagctccacccgtggagtgaaagtacgggcgcgaaagggatgctttcccatccacacctgtttcgcactcggaaatctttgcgcggcaatcaaaaacaatcaaaaaaatgtctcgaaggagagaatgatgtcagcaacggaagttgttgccaatatgccactgcattcggcaaccgtgcgtgtcaataaacacaaggcggattggcgcggttggaagttcatgtggccgttcgcgttggtgtgtgttcgtgttcgtgatcccgatcctgtacgcggtctacatcagcttcttccagaagcagatgatcggcggcacgaagttcgtgggaatcagcaactacattcgcctgttccacgaccagcagttctggagctcggtgggcagggtcgcgctgttcacctgcgtgcaggtgccggtcatgctgttcctgtcggcggcgatggccctggcgttggattccatgaagctgcacggcgcgaagttcttccgcatcaccacgttcctgccgtacgcggtgccggccgtggtgtcgactttggtgtggggcttcatgtacggcgcgaaatacggtctggtcggctccctgaacgactggctgggcacgaacctcgacgtgctgagcccgaacgtgctgctcgccgcgatcggcaacatcgtgacctgggagttcaccggctacaacatgctgatcttctacagctcgctgtccacgatcccgcactcgctgtacgaggccgccagcattgacggcgcgagcgaatggcagatcgtcaagtccatcaagctgccggaactgaagggctcgctcgcgatcacggtgatcttctcgatcatcggctcgttccagctgttcaacgagccgagcattctgcagaacatggtgccgggcaactcgatcaccacgtattacacgccgaacatgtacgcgtacaacctgagcttcgcgggcaaccagtcgaactacgccgccgccctggcgatcacgatggccgtgatcacgatggcgatcgcgtacgcggtgcagctcaacagcatgaaggagcagatgaagtaacgccctgggacgtacgccatctgcataggacatggatttttcaaggagcataacaatcatgagcgataccgcgatgtcgacggggtatatgactccccaagagcttaaagagcaggaacgagccgcaaggaaggccgagagggcacgcttgaagcgcgtggaaatggatgagaaggcggagcgcaaacgcgcggcgaagtccggtttcgcgaacgtgtcgaacccgaggcgcagcaaactgctgaccttggtatgcgcgatcttcgcggtgtactgcctgttcccgttcgtgtacctgctggtcaacgccacgaagacgcaggcggacttcacgtccacgttcggtctgggcttcggccgcacgttcgctttgtgggacaacatcaagaccgtgttcacctaccaggacggcatcttcgggcgttggctgctcaacacgctcctgtacgtggtcgtgggcgcgggcggcgcgaccctgctggccatcatgggcggatacgcgctggcgaagtttcgtttcccgggccgcaaggccgtgttcgcggtcatcatcggcgcgatcagcgtgccgggcatcgcgttggcggtcccgcagttcctgctgttcgccaagctcagcctgacgaacacgccgtgggccatgatcattccatcgttgatcagcccgtttggtttgtatctgatgtggatcttctccgagcaggcggttccgacggaattgcttgaagccgcacgagttgatggagcttcggagttccgcacgttcttccaggtgtccctgccgctgttggctccgggcatcgttacgacggccctgttcacgatcgtggcgacgtggaacaactacttcctgccgttgatcatgctgaaaaattcgaactggtatccgttgacgatcggcctgaaccagtggaaggaccaggcgagcaccgctggcggccaggcgatccagaacctggtgatcacgggctcgttgatcacgatcgtcccgttggtcatcgcgttcctgtgcctgcagaagtactggcaatccggcctctccgcgggcgcggtcaaggaataatcaatttctacaccacagccatggaacgaaaagtatggcccatactacaagtatgggccatacgcatatacatgatctggcggaccttcctcacaaatcacgatagttgttccccatcgtgagacgcacttcggctgcaaagctgaagtaattcagatccatatggccgaaagtgcggtctcgttatgagtaaaatctacagaacgcacttgtatcgccacaaactacaatatgtatcggctccacacaagaaagcgaggacatcgtgagcggcacccaggcaaaggcatcaccttccgatattcgaatcagcaatatcaccgccgcattcgagcagcttttccccgcaacgcaaatgtcgcgagccaatatcggcaaactcatcggactttcgcgcttcaccaccagcgaagtgaccggcgaaatggtcgacaatcgcattctgcgcgaactcggaccagacaatcgcgaagggcgcggtaaacgttcgcaagtgctcgccatcgacaccgatttctggcgaatcgtctccgtcgacctgtcgaatccgatgctcgtcaaaggagcgctggcggatctttccggcagaatcgtggaccgcaccgagcttcccgtcgaccatggctgcagcgtcaatgacgtgatcgacctctgcaggcagctcatcagctcaacgccactgccgatccttggcatcggcatcgcggtgaccggcattgtggaacccaacggcgtggtgcgcaaatccgtgcacttggggtggagcgaactgccgctgaaaaccaaagtggaaaacgccaccggagtgcccgtgatcgtaggcaacgacaccaatgcggcacttgtggcggaacgattcttcggcgactgctcccccaattccatgctcatctccatcgggcggggcgtcggcgcggcattatgcctcaacgacgtcatcatcgaaggaagttccttcactgccggagaaatcgcacacgtggtggtcgacccgaacgggccaatctgcgaatgcggcaaacagggatgtctcgaatcattcgtttccggcgacaggctgcagcaacgcatctcgcaggatcccgccgcgcgtacgcatattctcaccgaagcgggcgcgttgctcgggcgcgtcatggccataccggcaggattgttggatctgcgcgacatttcggtatatggtgcgccggaaatcgtcaatactcaattcatcgacgcgatggaaaacgaaatcagccgcaccgtgaccacggattatcaggaggcgccgcaaattcaccgttgcaggcaaggcgaggatctcaccctgcgcgggcaggccaccatcgtgatccgcacactggtgccgacgatccacgaacgcggctccctcatcggcgaagcatagctccggacgccttagcgcgacccaaaacctccagtcggtggaggaagccacccgctaacagacctgctaacgtccaaaaacctccagccaccggaaaaatcgccccgtctgcaactctccgagcatccggattcctccagtcactggaagaatccggaccgcaaaacacccccgtactgtccaaaaacctccagtgagtggaggaatcctcccgctggcaggccttttatcgtccagattgttccagtgagtggaggaacccggacgggatgagaagcgaggagacgaaaagaatgaaaggccgcctgaagcggatggagtgcttcaggcggccctggttgtcggaaaggaaggggaagttcagttatcgggattcaggctggcccgccggagtcgcggtttcagcagttccagcggtttcagccacggcaaccgcctcgacggcttccacggcctgagcgtcgtcggcttcgatctcaccgttggcgagcttcacttcgagctccttgacgatttcggcgtgcatcttctcagtgatcttcaccttgaacagaaacacgatcaggctcaggatgatgagcacgagcggaatgtagaaggcgcagatcttgaagatgtggatgttggatgcggtcatgtcggctgcggtcgcattgccggtcatgccagcggccacggcgatgatgccgacgatgccgttggacatggcgccaccgatcttatcgagcatcgggcggacggacagggtgacggcctcgttgcgcttgccgttcttgagctggccgtattcgatggagtcggtcagcgacaggatggcggtcatctgaatgagggtacccggcacgtagaaaagcaccaaagccacgaacaccatgatgatgtggtcggagaagatgccgagcatcacatagccggcgatcatggagatcatgccaccgatgtacaggtaacgacgcggaatgcgcttgttcaggatcgggtacagcggagccataaccaagcctgcgaccagtgcgatcacgccggtgagggagtatgcggcctggttgtcgaggatgaacttgaacaggaagatcagcacgccggtggtggccacgttggcgatggcgtacagcaggtagctcagggcaacccacagcagctggtcgttctggaagatggccttgaaggcttcgatcgggttgccgttctcctgggccttggaacgcagggcgctctcgttctccttggtgccgaaggcaacggtccatgcggtcaagaggccaagcaggccgacgataataccgaagcaggtccagccggactggctttcggcgtgctcaccggtgaacacccagctgaagtaggtgacgatcgggatgaccacgacggtgatgccgttgtagccgatggagccggtgaaggagccgagtgcggtgtaggtggagcgctcgtgggagtcggagctcaatgcagggatcataccccagtaggagatgtcacgcagggagtagaacacgtcgagcacgatgaaggtgatgacgaacagtacgatgaaccacgtggcgttcacgttcaccaagccgaacaggccggtgtacactagcacgatcagcacggacgaaatcgcgccggcgaggaactgccatgggcggaaacgaccccacttggtggtggtgttgtcgatgatgttgcccagcagcgggtcgatgaagatctccgcgatacggatcaccacgaccaggccggtgatgacgccgatcagcttggtggcgacgcctttatcgacaccagcgaacaaggagctcgtcacatagacgacgaagtaggtgctcagtgcgttatagaacgcggactggccaaggttgccgcacgcgtacgctacgcgctggccgatctttccgcgacgagccgtgccgttcgcggtagtggtcgtattgctcattatctcttctccctagaagattttgatgggatcacccgttaacctcgaaaattgagtatacgctgtttactatcaaaaataaaattccttagtaaacaaagcccccaaacggagtgtcgcaatcgcagttcttacgattatcaaataccgacatctgcaatcatgattactaccgccatttgccgtcacctatcgccatataagtaaattcagttgcaaacaacgcaacacgcagatttgcaatttaagtaaacaacgtttaccatgctagtaaaagagtttattactctgagtacacaaaagtacacaccaactaaacctacatcaacaacgaagttatgtttcggaaacgaggaaatcatggcagataagatcaccaccgcatccgccgcgtggctcaccgaccccacggtgttcgcagtgaatcgcacgccggcacattccaatcacgtgaccttttctcacattcccgcgatcggcgagccgagcgatttgaagcaaagcctcgacggcgaatggcgcgtggaaatggtgcaggcctccgacatcgatcttgaggaagagccgttcgcagccgaggatttcgacgattccgctttcggccgcatcgacgtgccctcccacctgcagaacgcgggatacatgaaccacaagtacgtgaatgttcagtacccgtgggacggccatgagaatccgcaggagccgaacgttcccgaaaccaaccatgtggcactgtatcgccgcacgttcaccgtcgccgagcgtcttgatgcggcccgtcaaaatggcggcaccgtcagcatcacgttccacggcatggccaccgcgatctacgtgtgggtcaacggcgtgttcgtcggctacggcgaagacggctacaccccgaacgaattcgacatcaccgaagcgctgcacgacggcgaaaacgtcgtggccgtcgcctgctacgaatacgcaagcgcatcctggctggaagatcaggattactggcgtttgcacggcctgttccgttccgtggaactcgccgcacagccgcatgtgcacattgaagatatgaaggtcgaagcggattggaatccggaaaccgccaccggctcgctcgacgcgctactcgcggtgcgcaatgcgaagaatgccgccaccgtgtcggcgacgctgaaggatttgagtggcaatgtggtgtgggaaaccgcattggccgcatccgacgaaaccggcatcgtttccggctcgttggacgtcaagccgtggagcgccgagagcccggcactgtacgaactgcaagttgtggtgatcggccatgatggcgcgatcgttgaaaccgcaacgcagcgcgtcggcttccgtcgcttccgcatcgaagacggcatcatgaagctcaacggcaagcgcgtggtcttcaagggcgccgaccgccacgaattcgacgcgaagcgcggccgcgccatcaccaggcaagacatgatcgacgacatcacgttctgcaagaggcacaacatcaacgccatccgcacctcgcactaccccaaccaggaatactggtacgacctgtgcgacgaatacggcatctacctgatcgacgaaaccaatcttgaaacgcacggcagctggtgcctgccgggagacgtggtcaccgaggattccgccgttccgggcagcaagcccgaatgggagggcgcgtgcgtggaccgtgtgaacagcatgatgaagcgcgactacaaccatgcttccgtagtcatctggtcgcttggcaacgaatcgtatacgggagacgtgttccgcgcgatgagcgtccacgtgcacgaactcgacccgaaccgaccagtgcactacgagggcgtgacccacaatcgcaagtatgacgacgtgaccgatatcgaaagccgcatgtacgcgcacgccgacgaaatcgaggaatatctcaagtccaacccgaagaagccgtatatttcctgcgaatacatgcacgccatgggcaattccgtcggaaatatggatgaatacacggctttggaacgctacccgcaatatcagggcggatttatttgggatttcattgatcaggcgattcttgtgcgcttgcccgatggcgatgaacgtctctgctacggcggcgatttcggcgatcgtccgagcgattacgagtttgccggagacggtattgtgttcgccgatcgcacgccgtcgccaaaggcgcaggacgtcaagcagctgtatgccaacgtgcgcattgtgccgggtgaaaccggcgttgagatcgcgaatgacaatctgttcgtttccaccgccgactatgtgttcgttacgcgcgtgcttgcggatggcgagccggtatggcaggccgaacagcgttttgatgtgccggctggcgaaaccaagcacttcgatattgaatggccgttggaggcctaccgaggccaagccaacgagctcacgctcgaagtgagccaacgccttgccgccgcggaagagtgggcgccgaagggctacgagctgtcgttcggccagactgtggttgcaggctccaagccggttgctgccagcgaggcgaagcctgttgacggcattgtgaccgttggccgttggaatgctggcgtgcagggatccggtcgtgagattctgctgtcgcgtacgcagggcggcattgtttcgtacacgcttgacggccgtgaattcgtgctgcgcaggcccacgctcaccacgttccgcgcgctgaccgacaacgatcgcggtgcaggccacggttacgaccgcgcgcagtgggtcggcgcaggccgttacgccaagtgcgtcaacaacaccatcgaacaggtcaatgacgatacgctgaaagccgtatacgagtacgagctcgccactccgcagcgcacgcacgtcaccatcacgtatgtggcagacaccaccggcaagctgcacttgagcgtcgactatccgggtgaaactcaggaagccccgaccattccggctttcggtttggaatggacgctgccggtcgaatactccaacctgcgcttctacggccccggacccgacgaaacctacgccgaccgcaagcatgccaagctgggcatttggaacaccaacgcttacgacgatcatgcgccgtacctcatgccgcaggaaaccggcaaccatgaggatgtgcgttgggctgagatcacggatgatgccggtcatggcatgcgtgtgagccgtcacggcgaatcagcgttcgcgctcagcctgcagccgtacagcgcattcatgttggaagaagcccagcatcaggacgaactgcccgctccgaagcacatgttcctgcgcgtgctcgccgcgcaaatgggcgtcggcggcgacgattcctggatgagcccggtgcacccgcagtaccacattccagccgataagccgctccacttggatgtggatatcgagctgatctgacacgttggggcatgccggttgccccaacaattacgggggggtccgcgtattctgcggatcccccctgtttgcgttattgcgttaccgcgttaccgccaatttgcattggcgctcattgcctcatatcatgctcaccgctcaccgctgcggataggaatcctcaaagaagcgacgctcgagatgcacgatggtgcggaacacgtcggcctccgagccatccaccgacgcatactcgttgacgagcgcgatcaggcggcccgtccaggcgcggaaataatcgccctcatgcaaatcaacccaacccttgtgcgccggaatctgctgaacgacgccagcgtcgatggtgcgcttggcccaggcaagataaatccattccatgcagcacagcgcagtaatgagttcttcccaagttccctgaaccagcttggtcagatattcgcaatattcacgattggccggagtctgctcggaattattgtattcttcgtcagtaattccgtattccttaaggaatccggtaaaatatgttgcttcattgtcagcaaaccattgcgattgtttcgccagcatatctttggtttcctgacgcggcgcaagttcaatcgcatgtgccatgatgccctgattaaagaacttgaaatcctgaattaaataagacttcaaaatcgattctggaagtgtatcatccagcaattcattcacaaaacgcgaattgattgcctgattccattcgtcggccgccgacatatacagctgatcggctacggaacccggctcggctcccaaccacgcataatcgccgcttgcggactgcggcgcttccggaacatgattcatggtcacaagacccccctcagttaatgcggccaatgcaaacgcaacgcacatctcctcgctccgttccgccgtggctcgctgtgatggcgccataatagccgccgttcccaacgtaccgaacgcgccaccgaaacgcaagaagcagaacacttccatgactgccatgaccgcactcaatctcggcgaatcattgcgcgaatttgttgaggcggcgatcgtaggtcatgaggccgttgagctcttcttcgacgtcggaaacctgcgtatacacgtagcccgccaatccgcgtgattccaacgattccgccgaatcaagcacggaacggacggcagtgcgccaatcctcaatcgaatcgtattcaccgtagccgtacgcgcgcgaaaccgcagcatgatcggcaaccaactgcgccaatcctccgaattccgaaatcacgaacgcacgaacgccatgctgcgcaaccggcaacaccgcgtaatgcgcggcacgacgacgacgcttatgccgcttttcatattcggccacatacccacgcaacggccccttatccgggtagatttccagcggtcggaagtagttatgcacgctgtgaaaatcgccgcaacgctggtcgtaccagccactcgtggcgtcgatcgggcgcgtcgggtcaagcgcatgaatgcgttccgccgcatcgcacgcgtcgaactgcccccacccttcgttgaacagcgcccacgtgacgatcgacgggtggctggcaagcatgtgcaccatggcatcgcaagtgcgcgaccagtcgcggcggtacgtcgaatcgtcggcaccgagcgccgcgaaatgcttcgccgtgtcgtcgcggtacttgttccatgtggcacgcatgagcgtcggcttgcggttggtggcccacgcgttgtattcgccgccacccgacaccgcgtcctgccataccagcatgccgaggcggtcgcaatggtagtaccagcgcgccgactcgattttgatatgcttgcgcagcatagtaaagccggattccttcatggcggttatgtcatgcaccagcgcttcgtcactcggcgcggtcagcaggccgtccggccaatagccctggtcgagcacacccttgaggaacaccggcttgccattgagatggaagcgcgcgatacccttcaaatcaggcttaatctcaaccgtgcggaacgcgcaatacgagcgcacaatatcctgctttccctgcgatttcgcgggtttctcttgaatttcctgcgattcttgctgcagcttttcctgcttttcctgcgatttcgccgcaccaaattccagcgtcgccgtcacgtcatacaaatacggatcgttcggcgaccacaagtgttcggcccgcgttgcgatttccgtgcgtaccttgcgcatgccagccggcagcagttcgtccgcgacgatcgtgccgtccgcgggatcggctacgacgatatgcagtttggcattcggcttgtctccgccgatttccgcgcgaataaacaatctgccgtcggcggcgcccttcagcgtaagcgtccgcacgtacgcttccggcacgatctccatccacacgctctgccaaatgccgctttgcgcggtgtaccaaatcccctcgcgctcgattttctgcttgccgcgcatttgcgtgcccgaatcgttcggatcgtacacgcacaatgcaatctcgaaagcatcatcgggatcgacgaacgccgaaatatcgacgtcgaacggcaaatatcccccgacatgcacccctgcaaactgcccgttgataaagcaggcgcacacgtaatcgaccgcttcgaaatgcagcatcaagcggttcgcatcgccgatctgccgaaccgcttcctctcccccaagcgtcacgggatgcaccaccgtgcgataccagatcatattgtctgggtaaatcgtctgatgcacgccggaaagcgcggattccggggagaacggcaccaaaatcttgccgtcgaacgtttcggggatggccgcttccttcactgcctgcaccgcttcgtcacaggtgagcacagccgcggatttgcgccatttcgagccgttgccgctttcgggaatggacacgatcgcgtaatcccagaatccgttgagcatggtgtgattgccgcgcaccatggttgggcgcggatgctcgttcaggattggcgtgcggccgttttccagtttgcgttcgccgtcttttgcagggcagaacgccttgtgggcgtcgttggaagacaaccattcgccggcgatctgttcgccccagggcgtccacaactgctgcagcggctcttgggaacgcattttcgtaggcgcggctttcagcactcgcttgacgtccaacataagagcctccctgcagcatcgcatttccctcaacttcctcattgtaacgagaggaatggcaaagagaaatagcgattgttacggattttgaaatcgattcaatccggattgcactatagatttgtaaaatcgtatatagaaagtcgaatattgcacattagatttacaagtcggatttgcaaaatcagatataaaaagccggtgcaagaacttcgtaattccttgcaccggcaatcagaacaactcaccttagcggcaaatcaggccaaatcaagccgaatccccaggtgaatcagcgaatcaaccttccagcttggccttttcggcggcaagacgggccgcctcggcctcacgacgagccttcagctccgaatcgaagcgagcgagctcctcttcgacggcctccggcggaatcttcgcgaaaatcggatgcggcttcggcactgcagtgccggccacgatcggctcggaagcccacggatgcacggtttcgcccagcttgtagtcgccggtgatgatcggatacatgaagcccggcttgtcgagatcctcgacctcttccaagcgtggcaacggcgagaacgtgcctgtgccgccgagagcctcccacaccttctgcgcggaatgcggcaggaacggggccagcaggtggttcgcgtcggacacggcctgggcggcaacgtgcagcacggtgccgaggcgagccggattgtccttgatcttccacggttcggtggcggaaatgtacttgttgatgtcgccgaccacgcgcatggcttcgctcagcgcgttcttctggcgatggttctcgatcagcgaaccgaccgtgtcgaacgcggccttggtttcgctcagcagagcgcgatcctcatcggtcatttcgctctcatcgagcgccggaatctcaccgaagttcttgttcatcagattggccacacggttgacgaggttgccccaggaagcggcaagctcctcgttgttgtggcgcacgaactcagcccatgtgaagtcggaatcggagctttccggaccggccacggaaatgtagtagcgcacggcatccacagggtagcgggcgagaatgtccttcacataaatgacgatgccacgcgaagacgagaacttcttgccttccatggtcatgaattcggaagccacgacctgctccggcatgttcagcggaccgagcttgccagtttcgccgcccttggagccctgaccgttgtagccgagcatttcggacggccagatctgggagtggaacgtgatgttgtctttgcccatgaagtagtagcccggggtttccggatcattccaccatgcgcgccatgcttccggatcgcccttgcggcgagcccattcgatggatgccgacaagtagccgatcaccgcgtcgaaccacacgtacagcttcttgttcggattgtcgatccagccggcaaccggaacgggaatgccccagtcgatgtcacgcgtgatggcacgcggcttgacttccttgaacaggccgatggagaagttgatgacgttggtacgccagccttcgcgggtcttcagccatgcgagattggcttcggcgagcgccggcaggtcgaggaagaagtgttcggtttcctcaaagcgcggggtttcgccgttgattttggaaacgggattgatgagctcgtccgggtcgagttcgttgccgcaggcgtcgcactggtcgccgcgggcaccgtcggcaccgcagatcgggcaggtgccttcgatgtaacggtcaggcagggtgcggccggtggacggcgagatggcgaccttctgggtgcccttataaatgtagccgttggcgaggcactgcctgaacagttcctgcaccacctgctcgtgattgccggtggtggtgcgggtgaacaggtcgtagctcaggccgagatcgcacagatccttggcgatcacacggttgtaacggttggcgagctcctgtgcgctgacgccttccttgtcggcttccaccaggatcggggtgccgtgctcgtcggtgccagacaccatcagcacgtcattgcccttcatgcgctcgtagcgcgcgtatacgtcggagggcacgccgaatccggcgacgtgaccgatatgacgggggccgttagcatacggccaagcaacattcaccaaaatatgactcatggtgcctgattatacaaaccgccatatcccgctttttccatgtatttcggtagttggatttttattggaggatggacgtgcgatcgtcgatttcaatcgtttgaaatagcttgcatcatattttgcatatctgccgatctatccacattgttgcattacgcaacaatcattttccacatatccacagattttcgggggctggtggcgcaacggaattcgaatccgctacggtaccgtcatggacactccaccaccccttctgggcaacgacgaccttccgggcccgatgtgcctgaacctgctggcctcatccggcgcgctgtgcaagctcgacagcgtgaacgcctattcatgccacgattcggacacgttgtacgggcgggcctgcatcatcgcgacattgctgccgagccggtccgtggcatgttcacgcaccgccgcatgggtttggctaggcggcaccttccccgaatccatcgacattatcgcgaaagcccactatcgagcgctacgttacggccgtaaaatcaacgttttcaaccgtctcgcaccaaacgaacacaccatcaaagtcggtccgatcatcgtgaccacgcctgttcgcaccgcatgcgatctcgcattgaactgcactcccgaaagcgaatcgttggtttccgaaatcatctgcatgcttatgcaggaatttcatttccgctccaacgattgcatgcaaatcatgcaggagacgaagcatattcgcaacgcgccacaggcacgcaactacattcttgcgatcgacggaagaagcgacgaatatgagcgcagcgcatagcaggcataaggcgcggcgcgcgacgcacgccgacaggatagatgccgacagagcaaacggattccgcagactgctcggaatccaagaaaaacgcaggccacggacgcatcgcgcgacgcatcggcatgcgcggaatctcgcacaccgtgcacagcggacgcgccgcgaaccgccgccataccagcccaaaccgcggccgaaaccgctggtggatccgccgtctcccccaattccattgacgccgctggtggcgtgcagtccggacacaccgcaggacgtgctatggcatatcgcggaatacacgccgcaactgcgcaaatggctggtcgccaatccttccgcaacaccggcgatgttggactatcttgcgcaagtcggcgggccggacgtggcccgcgccctgcaaatactgctggaatcgttggaatcgtgcggatcgcaagcatgcagctaacatttgcgcgacgggcaatcgcacgataggcaatcgccggacgataactaatatggacttactgcttcatcgcaagaaccgcattgtagacctgcttgcgattggcaagcgagccgtccgcaaggggatgctcggcaacgacctgcgaaatcgcgtctttgatgcgcagattgtcttcctgcgcacggtcgatcgacagcaccgccaagtcttcgacgctcaacgatgcgggggcagcagcgtcggcctcctcttcggaagcgccggcaacgaccaacaccatttcgccgcgcggcggctcgtcgatcacgctctggcgaatctgcgcgatggttccgcgacggatctgctcaaaatccttggtaagttcacggcaaagcgccatcttgcggttcggaccgaacacgtcaagcaagtcggccatggaatcgtcgatgcgatgcagggtttcgtaaaacacgatggtgcggcgttcagaacgcagggtgcgcaggtattgcacgcgttcggaatgcttgcgcggcaggaatccttcatagcagaagcggtcggtgggcagtcctgaaaggcacagcgcgtccagcactgcggacggaccgggagcgcaggtgacgggcagaccacgttcgatggcgcgacgcacgatcgcgaggcccggatcgttgatggtcggcatgcccgcgtcggacacgaccagcacggtagcgccggtttccacctgatcgagcagaccgtcggacttgtctcgctcgttgtgatcgtggtaggccaccacgcggccgttcacgtgcacgccgagacggttggcgagcgcgtagagacggcgggtgtcttcggcggccacgatgtcggcgcgctccaggagcgcaatgaggcgtgcggaggcgtcggccgtgttgccgatcggcgtggcagccatcaccaccgtgccttgcggaacgtcggttccgcacacgagggcgtcaagtcccgtgccagactgttccgccgctgtcggcgattctgccatctccgccgtattcaccattcccgcagttcccgttacttctgccgtattcgcactcaactcattcagtttcaagtccaacgtctcattcatgcgttccatgccttcagcctatccaacgcaaaggaaaacagccctccccgcgtcctaaacccccaatcgctggaacaatccggacacaaaacagaccctcagcggggtgattcccccacccactggaacaatcaccccgcttacagccccagtaacgtcccaaaacatccagacattggaacaatccggacgccaacaggcttaaaaacgtcctgattcttccagtgactggaagaatccgcccgcctacaagactaaaagcgggcagattcctccaccgactggaagaatccgcccgcaaacgcatgcttacaccgcgcacacgtacttacctcgtgtacatacgtggcagcgaatcggccatgcgtatgaagctgttgcgcgcgaaagcgttgaaatcgcgcgcatacggcgattccggcagcagagtgccatatgcgcccgtgccagcagcgcccgaatcattgccccagaccgccggatatgcgccggtcacggcatgcacgtcggaatccgtatcgggggtaatcacattgctggtttcgttttgatgaccgaacatggagaattttccggccgccgcatgcaacgcttcgagcagcgcccgcgattgccgattcagattcccatcaaccgattgcgcaagattttccgccacgattcacactcccttgtatttgccgtattcgcctagtcttgcattgccccaaccgctctcgcattgccttactgctgtttccacgctatcttccgcgccatcgaaacacactttcgtaccgtcaacatgcgcgattcgtgttcagcggccccactatttgatttgttgacctcacgattccgtttttcgccgccttttttcaaatcatgaggtcaccaaatcaaaatcatgaggtcaccccccacccaaaaaaaaaccaaaatcgtgaggtcacaacgccaaatcacaatgagcgatatgcgacataccggatatatcgcacactctaaagccaaacagccaaacaccaaacacccccaaaccaaaatcacccaccgcagttgacactttgcgtccgtttgtgcagatttgccaaccgtcgggcattactaggcgccgcattagagggtcgctggtaggctggcattggttccgcaagggcaacccacacaaggcagcctgaaccacttaattttggacgtttagatgtaaggtactcacagagagcattccatgggaattatcaacttcttcattaatctgctcaaggatccgcgcacggcgatcgccagctggatctccatgggcgtcgcacccacgcttggtttcatcttcctgattgtgttcgtcgaaaccggcgtcgtgttcttcccgttcctgccgggcgactccctgctgttcgccgccggcttcttcgccgcgcccgacgcccagaccggcgtttccgcactaccgctgttcgcgctgctgcccgtggtctggtgcgctccgatcatcggcgaccagtgcaactactggatcggccacttcttcggccgtcgcatcatcgaatccggcagagtcaaggctatgacccccgaacgcctcgccaaaaccgaaggcatgatcgaaaagtggggcccgctcgccgtgttcctcggccgtttcttcccgttcatccgcacgttcatgccgttcatttccggcatttccggcatgcgttggagccgtttcaccccgttctccgtgctcggcgccctgtgctggtccaccctgttcacgctgctcggctacttcttcggcggcattccggccgtgcagaagcatttcgagctggtcatcattgcgattctcgtgctgtcgctgattcctaccttcgtcggcttgctcaaggcaaagttcggcaaaaagaaggctgataccgcgaccgcggaagcctgatcttacgttttctccttttcttgcgattgcggtgtctttcgatttttcggaaggcaccgttttcgtatgctttcgcatgcttttcctgaaagggatattccgcaacacgcgaatatcgcagattgcattcgtacagacttcgtactagaatcgcgagagttgtcttgcttagcttgttgctagacatgacttggggccgtagctcagttggtagagcgcttcgttcgcatcgaagaggtcgcggtttcgactaccgtcggctccactaagcccgctgcattcattccaccgcagcgggctttttcttttcctagccaccagacaaatctgccatacgtaagcgagatggggcgaaaaatcaggcctgggatacgcgctgacgcacgaaagcgtcgagcgaggccgcgtcaatgccctcgtagcccttgatcgaggcgaactgcgggccgttggaattgtcgatctgcatgaacccggtctggccgatcgtcgtcgtgccggaggcgacggccgaacgcaggcccgacatggaatcctcaatcgcaatgcagtacttcatatcttccggagcgatacccaagcgacgacccgcctccaaatacggggccggagacggcttcttctcaacatcatcatcgccgcacacgtagcccgcaaacgcgccagccggcgcttggacaaccagattctccgcaagatgacgcggcgacgtggtgaccagcatcgaaggaacgccagcgtcacgcagcgcgacaagcacgtcttccacgccttcgatccacggaatgcgctcgaattccttttgggcgacgtaatcgatcatgccctggccgatctcttcaatcgacagctggcaaccatgctccaccatgcgacgggccacatccggaaccggcgtgcccgaaccctgccaggcgagctcctcatcccaatatccgccatgcgcggccgcgattttcatctcaccctcatgccaatacggttcggaatcgatcagcgtgccgtccatatcccaaaacacggccttgatcatcaggttcgtctcggtcatgatgttccttccctacgaccgtcggacgcggagcaccggatttccgggcagcgccgtccatcgcgacttccactgccatttcagcagagcggcaagacggcagcattcgcgagtcgcgacaaaacggcagacaacaaacaggcatacaagcgaggcaaacgaaaagcgcccggacggtcctccatccgagcgcttcccatatcgacgcaatacttcgcgcctacgtattcgcaaaatcatccgatttttttcacgaattatcggcaacccccatcgctataatccatgaaattcgaaaatttcacttgtatcgggagatttgaaattcactctccctgattttcactgttttccacagcggtttcagcggccttttccgcattttccgccttccagcgagcgatgcaacgttccacgcgcttgtatccgatgatcttcggatcaagcccggcctcgcggaaaatcgcggcaggcgagccaccttcggcatacctgcgcatgcaatcatcgcgaaactccttggagtaacaaatacgatactgggtgaccgattccacggcatccagagacccgagatacttgcgggtcttagctgtgaacgcaactcttggcactgtacgctcctaacctttcctgttctcgccgcatatcttaccccctcctccatgattattcatgggcaaagagaaccatctttcaccgaagcaccttgacgaccggaagaatgacagttagaacgcggatactcaacattatttcccacaacgacgacatcgtcgcaggaagcaatgcatttggcaaaactatataacaaaacaggcacatctgttgcaagatatgcctgtttttgaattttttttcaatgttttctgaaaatcagtcaatcccccaaagcacgatagacctagaaatcggctgagaaacgggtttacccctctcaatcccctcgttttcgcctgtgacacccccaccgcgcgtgtcgtacgcatcagccgcgacacgcgcggcctccacggactcgcgcgacggcagctgacgggcgtcgacctgaatctgccgacgccacatgcgagcgcggcgggaacgttcgatttccacaatgtcaccgtccgcatcggccgcgaacacgctggaaccggccggccggcgcaatcgctcgacttgccggcgcagctcgcggttctcctcttccaaggaaaggatccgcgcgatgccagccaggttgatgccttcttcctgactcagctgctgcgctttcgcaaggcgcgagatgtctcgcagcgaataccggcgagcgccaccgtccgtgcgttgcggcaccaccagccccaaacgatcgtattggcggagcgtctgcggatgcacgttggcgagttcgccggcgcgaccgaccgtgaacatcggcagttcgatgtcgaaaccaacttcatccgccccgtccagatcggccctgccggccacgatcgccactgcgcacatgtcgtacagcattttggcctgccgcgccgcacgggcttgggaggtccgggatgcgcgtgccatggcaatcagcgctccttggcaagttcgtcagcgaaatcgccgcactccttgtcgaattcctttgccgcatgcttgactttcaggctcggcttgtcgggaatgcggatttgcacacgcccgatcagatcgccgtcgccctgcctgttggccacgcccctgccggagatgcgcacttcggtgccgctggacgagcctgccggcactttgaaggtgacttcgttgccgtcgatatcctgtgcggtcactttcgcgcccgccacggcctgaccgacggtgattggcagatccatgatgatgtcacgcttgcgcaggctgaatttcggatcttcggcaacgttgatctgcaggtacagatcgccgttttttccgccgttacgacccggcttgcccttgcctggaatacggattttctgcccgtcacgcacgcccgctggaacatgcgtcttgaacttttttccgtcggcagacagtgaaaccgttgcccccttgaccgactggcggaaagtcagattgatcttggaattgcggtcttcgccgtcttccggctgcgcagcctgctcgtagctgcccccgtaggggttgccagccccggcagggccaccagcgccgccaccgaacatcgagaaaatatcgttgatattcggattgccgccaccggtctggaagcggatgcgcgagccattgccgcccgtgccatacgctccagcgccagcgccaccgccgaacatcgagccgaagatgtcggagaatgcccccgcgtcgaatccgcccgcaccggagccgccggcgaagcgcgcgccgcccatgccgaactggcggatggcgtcgtacttctggcggttgtctttgttgctgagcacgtcgtacgcttcggaaatgtctttgaacttttcctccgcttccttggtcttgttcagatcaggatggtacttgcgcgccagcttgcggtacgctttggtaatctcatcgtccgtggcgtctttggagacaccgaggaccttgtagaaatccttgctcagccattcattctcagccatgatgtgcctcctttcacgaggttgctgatgtcaaatgcctgttgttgttgaaatcgctgtcactgcgctagctctgcggggatgccacgaccacgcgagccgcgcgaatcacgcggtcgccgatacggtagccggcttccaccacggtgtcgacggtttccttctcggcctgcggatccggcttgtgcaggatcgcgtcatgcttggtcgggtcgaaatcctcgcctttttcgccgaacttctcgacgccgaacttttcgaacgccttgtcgattttggcggaaacggctttgaaggattcgtccatttcgctgtgttcgcgaatgcgatcgatgtcatcaagtgctggcagcagtgcggtcagcacgtcgatgatgccgtgctggcggaagcgttcctgctccttctgcgaacgattgcggaagttgatgaattccgcacgttcgcgctgaagggcttccaagtattccgccgcttccttcttggcctggccaagcggagtcagcgtatcttcaccatcttgcgtcgcaccatccgcagcatcgccgttttcttgcgattcggaagatgctgcgttcgctgcagttgctgcagaatcggaagttgtacttgctgcagaatcgccattattctgcgattcctgcgatgcaccggctgcaggggcggcctgcccggacaggttgtccatgtcgggcaggtcgttcagatattcgtccttgttgaagtcggacatgattacttgttgtccttgtcgtcatcgtccacgacttcggcgtcaaccacgtcgtcgtcagcgggagcggaaccggcggcacctgcggcacctgcggcatcggcggcaccctgctgtgcgtagagggcctggccgatcttctgggcggaggtcatcagctcgctctgggcggacttgatcttctcaatgtcctcacccttcagggcttccttgagctcgttgaccttatcggtgacttccttggccacatcgtcggagagcttgtctttattgtcgttgacgagcttctcggtctgataggcgaaggattcggcctggttgcgggtttcggcgtcttccttgcgcttcttgtcttcggcttcgtgagcttcggcttccttgaccatgcggtcgatttcgtccttgcccaggccggaaccgccggtgatggtcatggactgttccttgccggtgcccttgtccttggcggacacgtgcacgatgccgttggcgtcgatatcgaaagtgacctcgatctgcggaacgccacgcggagccggagcgatgccggtcagctcgaaggtgcccagcggcttgttgtcgcgagcgaactcacgctcgccctggtagacctggatgagcacggacggctggttgtcttcagcggtggagaagacctcggaacgcttggtcggaatggcggtgttgcggtcgatgagcttggtcatgatgccgcccttagtttcgatgccgagggacagcggggtcacgtcgatgagcagcacgtccttgcggtcgcccttgatgacgccggactgcacggctgcgccgactgccacgacttcatccgggttcacggactggttggcttccttaccgccggtgagctccttgacgagctccttgacggccggcatgcgggtggaaccgccgacgagcaccacgtggtcgatgtcggaaacaccgatgccagcgtcgtgcagcacgttgttgaacggggtgcggcagcggcccagcaggtcggaggtcatgctctcgaagtgggcgcgggtcagggtttcgtccaggtgcaccggagtgccgtcaggggtcatggccaggtactgcatggagatggaggtgctcgaagaggagctcagctccttcttggcctgctctgcggcttccttcaggcgctgcagggcgatcttgtccttgctcaggtcgatgccatacttgttcttgacttcgccgacgagccagtcgatgatcttctgatcccaatcgtcgccgcccaagtggttgtctccattggtggcctgcacctgaatggtggagaagccgtcgtcgtccttgccgatctccagcagggacacatcgaaggtgccgccaccgaggtcgaagaccagaatggtttcgtcttccttgcccttttcgaggccataagccagtgcggccgcggtcggctcgttgatgatgcgcagcacgttcaggcctgcgatggtgccggcgtccttggtggcctgacgctgagcgtcgttgaagtatgccgggcaggtgatcacggcgtcggtgaccggctcgccgaggtaggcttcggcatcgcgcttcagcttcatcagcacctgtgcggagatctcctgcggagtccacttcttgccgtcgatttcaacggtccagtcggtgcccatgtggcgcttgacggagctgatggtgcggtcgacgttggtcacagcctgacgcttggcgacttcgccgacgaggatctcgccggacttgctgaatgccacgacggacggcgtggtgcgagcgccttcagcgttcacgataacggtgggctggccaccttcaagagttgcgatgcaggaattagtagtacccagatcgatgccaactgcgcgtcccataacttgtctcctttgtagataggttcgctatgcgttttctgttctattcgttctttcgcccgagtttcggtttgccgcctcccggactttccaaaacttgagcctacaccactcaactttgaatcgcaagcgattattcccaaatctacaaaaaagttgagttctcttcgctcaactttttgccggacgcaatctcaagacacgatttcaaggcgcgatcaccatcgaacatcaatcaaatcgcaatctcaacaaaacctgccatctcaccatcggcagggcgcgaacgcaatccgtcaacgtttcaactgcctttcgttgacgaatcgccattaactgcaatcaaccggccaaatcaggccgcaccggaacccgcgttcggattagccagattggcggcgaccggcgagagaagcacacgacccgtaccgcgatacacgttgaccaagccctcgccgctcgcaaccgaaccgatcagcgtcttcgtggaacgctcgaccatgaactgcaggccgttcgtccacgcgatcgcgaaattgccgtccaccttcagctcgtcgttctccaaatcgacggtcacgatttcggaagcgggcaccggcgactccaacgcaaccgttccctggcccatcagcgacaggttgaacaggccctcgccgccggccaccatcgcgctcggacgcgaaaccataaccgcatgctgctgaatcgtggtttcgcaagcgtagaacaggccgtcgttcacggtgatggcgccgcccatctggctcggatcgagcagcagcacatgacggtaggtcggttcgagcacaaccacgccattgcccacgtattccggcttgaccgcggactcgttggtgaccgcgccacgcgccagcttgccgatgaaatcgccaacgcccttcacaccggtcgtcacttcgacatggccgacggtccactgcatggcgcccgcctgcacaaccgcgccggtcttgccattgagattgcagaccagttgacggcggcgcacgttcatttcggacgcatagtaggcgtccatggcgctgccgtacgtcacggaaaaatcgcgcttccactccatgacctggaaaatgccctgctgcgcgacaattgcggcatcgtcattatccgtcagattgtaaatacgcacgaatgctcctttgctggtaatactttgttgataatactttggatgtcgagagataatctcccggtttgcgagatagacatctcgaaggatattgtctcacaacgcttgttgcgttgaatgacccatctcattttggatttgcggcccgccctgtctgcattgacctcacgatttcgatttggcgacctcacgattcggaaaaaggcttaaaaaatgaaatcgtgaggtcagaccacaaatcgtgaagtcaccaaacctgaatcgtgcgatgaagcaaaagatccggaccacactgcaatgcgtacgatccggatcttatttgcgatcttcagtttttcaatcttcagtcatgatcttcagctgcgatcttcagatctcttcagattttcagcggctgatcttggcggtcttggcgttgccgttgccgatggctgcaatgcgccgagcgtcgccgcggatgcgaccgctgcgattgcgctcttcaaagctttgtgcttgctcatgtttcttctttcttcagcctgtgctgtattgcaatctccacgccaggtttcgcaaaccaacttccgaggcgttttggacgaacaaaacgtgaactctcgtcttcacaaagtgaacacttatctcaaatcctctttccgtcaaccatcatccccaataccccctaaatactgaattatgactcatgcttttgtcgcatgaagggtaaacggtcaggcaggggtgcggcgcgtcaggaagaggcgcgggcggaacgaatggccttgacggctacgaagaggctgcgaatcaggagcacgcacaggtagcaggcgaacagaatcgatccgacgcggggcgagaccgcgcccgctatccacgtaccgaatggcgcggtaacggcagccaccaagccaataatcagcgcggccttcacatgcaccagcttgcgtttcaggtttgccgcgcttgtggtaatcgagttcgggaacatggccagcagcgacgtacctctcgcaatcagatcggacgcgccgaacagcatcgatagcgcgggcacggcgagcgccccgccgccaatccccagcagtcccgccaatatgccaatcaccacgcccagcagcgctaggcaaactccggtcagcgcactcatcgcaatgtgctggtcgcgcgacggcacaaaactaatctgattggccaccacaaacacgagaaacactacgaaaatccatcgcaatacgagttccgacaagcgcgaaagcagccagctgccaatctgcccgcccacaaacatgccgcaaaacagcagcagcgcggcgagccagtccacattcccgcaagtcgcgtacgaaatgacgccggaaatcgaggtcggtacgatcgcaagcattgacgtcgccgccgcattacgttgcgccagtccgagccataccagcgcgggcacaatcacagtaccgccgccaatgccaaacatgccggatagtagccctactgccacgccgacgatcaccagcactgcaatgcctcgcgcggattcgtcgagtcccgcaggatccgcaccaaacagtcgatccgctttcccgccgaatttcccgctcggttgcacactcgatcgcacactttcttcagcgcgttcaacactttcagcattcgaaatattggaaatatccgatttcttcatctctcccctaccatcgcactttcttcatcttgcgataattgcgatagtacattcccacacatcgcagcgtcgcaagaccggcagaatacgagaaggaagaagagaaactacgcccgtctgccggacgagtggcgcccggcagccacgcgatcggctttcacgatgcgcccgcgccgccacagccgtgccagccatacgcacgcgaatccaatgatcgacacgagcagcccaatcacaagagccgccacagccgtcatataccccggctcgtcgtacgtggtcgcgtccggcaccttcgggttcggtatgcgatgcccgcgcacgagcagcctgtgcgagttcaccccgtatggcgtgcatgtgatcagcgtcgcatagtctttgccggattcgatgttgagtttgctgatgtcgctcggcagcactacggaaatttggtcaacctggtacgtgtaggtttcgtcgagcacgtggaatgcgaacgtgtcgcctttttgcagttcgtcgagaccggtgagcagtttcgcgctgggcagtccggtatgcccggaaatcaccgcatgcgtggtttcgccgcctacgggcagtgacgttcccgccaaatgccctgccgcgatttgcagcacgccttcgctggtgccatggtagacgggcagtttcactttgatgcgcggtatggtcacgtatcccatgatgccggtaccggttatgtcgagcgtgttttcatatgtttgccgctgttcgtcggtaaggtgccagcggtcgccgttcgccgcgagcgcctcgttgtaggcgtgcgccacgtcgagcatgtgctgtttttcttcgccggagagatcttcggtttgttccacgtagcttgccacggcgtacgactggtgcatgcggttccaccagtcgctgaatgttgggtatgcgatgaggcagatcgcgccgatcatgaatattgcggatattgcgattaatacgtcgagcagcgcgttcgacttcttcttcggtttcttcgattgttctgcagtttttacctcttgagatgattgagaagatttcgattccgcacttcccgcagaatcttctgcactctctgcaaactgctcgtaagaatcggcaaattcagcaaacccggaaatagcaaacccatcagcggtatttcggcgcgcttcagcgttcggttctcccgattcgcttccgttatgccgccgtttcacgctactgcttgccttcccgctttctcgcgatcctcactacgcctaagagtaccaatgctgcggcgcagatggcggctgccatccaggccacgctctgtaccgccgagccggtgtgtgcgggcggggtttcgggtggcgtgtgcgtgttggtgatggtggtggtgtcgccttccacgtcagagagggtggtgtacccgctgggtacggaagcttcgaccaccgcccactggtgtgcggaggaaagtcccgtccacgaatgtgcccacttgttggaatcgttgagtttcacttcttcgaataccacgccgtcacgcaataatttcacggtgatggcttcggggcgcttgccgtcggagtcattgcgatcgttccacactttgcgcacggtgcgttccagggtcggcttgagttgggtggagcattcggtttttggttcgatggcgagttcgcgtgatccgttggagacgccgtcttgcggcatggcgacgagcatgttggcggaagcgcactgccagtaggagtcttcgtcggccgttccgccaacagcagccgcgccagcagcgccttcgactttcacgctatcggacacgaccagatacagcccgtcttccacgccggcgaacgtgagtcgcccggctttgtcggtttcgcccgagtccacggctgcggattcgcttgccccgttcgccgcgatgagtccggcgagcgtgttggccacgtcgcggtacacttgcgcgtcatatccggttactttcgaccagtcgatcgggtatgcggtggagtcggtgaatggtgcgacgggttcgaagtttgcgccggacgagacttgcccgactttgtataggcggaaggttgctcccggaatggcgaactcgcccgttccagcggttccagaatcggaagcgactcccgcattagagccagccccgtcattgcttttgtgttgatacgtaatggcgatgctgccgctggcagagtctgttggcgccgcaaccgcatcgcgagtggtgagtgcacagattgcggcggcacatgcgacggcagctgcgcagcatgttgcgacgatgcggcttgcgatcgtgtgttccttcattgcctgcccctcttctgtggttctttctgtgaaaactagaaatatcaagtcgcccccaacttgcgacttggaaaaattagggagtcaggctgaattctcgttagtttaggcagtttacaagggatttgaggcaatccagcctgacatatgtgggttcagttattgttcaattatttttaaattatgttgattgtgatgattccgctgttgccatgcggaggtaagtgcatggcaacagcggtttcatgtgtagttattttcagttatggtttttgattttcagttatgttgactgtgatctgtgagatcaggcgttgcggcgacgcagcgccatgaccagggttgcgccagcgagcacgaacactgccacgccagccacatacagcatcaccgtgcccatgccaccagtggacggcaggttggagcccttctggttcacaatggtggtggcgacaacaccggtggtcgtattgccttcagtcgtaccgatcttgagcgcggtcagcttcggatcagtggaatcaatatcatgctctgcggtgatttcgaagagcgtatccgctgcggtgttgtagcctgccggagtgtgggtttccacgagcttgtacttgccgtcgtcgatgcgcttgtaggaggtggtgtacttgccgtccgtgcccttggtgacggtcacttcgccgagatcagtgtcgtaagcgctcgtatcgttgttgtacttatagagcttgaacttcggcaggtcattcacagccgggttgccgttgtcgctgaaggtcttggtgatgtccagctcgtaggtgaacacgatgaccttatccgtaggggtttcgccggtttcgccttcgccgccaacattcgggttgttagagaactcaagggaggcctcgttcggattgccctcggcaccaatcttagcgttctcattcagcgtggaagtgtattcgacggtgaacttgccaccagcagcaacggtgattgcctggttatcagtgtccttgacggactttgcatcagcaatggtgaggtcgaaggtgtgattatcggtagcaggcgtgtcgagagtgtaggagccatcgttaagctgcttgtctccatacttgacaaccacggagtcactattgaaggtcagacctgcggactgagtatcgtggaagaccagcttgtaggtcttgtatgcggcgaaatcagccggatcggtcggcagggtggcggtcagctggaacggaacattgtcattcacgtcgtagtcggcggaatcctgccagtcagttgcggcaccagtagagtcgttgatgtccttgaccttcttttcaaaggtcggcttgtcagccttacggttcacagtcaccggaccattgacccgcacgatgaacagggtagaagcatcgtcaccagtcacggtggtgctgtccttcagcaggtagtaacctgcggcagcatcaagaggggcgtccttggagaccgagccgaaagcaacaccggtcagatcaacgaacttggaaatggttgccagcttcgtagtgtcatcagcagtgctaccaagctcagcaatcttgacggcagcttcggcggcagtcaaattagcgcctccctcgccagcaccattattttcattgaagttcttgccagcggtgacgttacccagagtgttgtccttgctcaaagaaccggtgaaaatctgatacacagagtaggtgtgcgtatctttcggccggcacagtaatccggtacgtgtccactgccattgcggtgcctgcgccgaacatgccggcgatggccattgctgcggatgctgccacagcgacgaggcctttgagaaccttattcattgttctccctttctttccttttccataaacttgttgaaatcttcgttgttttccaacgttttcaattatttttcagttattgagttattgcccagaaggcagtggtcgtttgttttacggaccatcccctcctcttctagacgtgttcattgccgacgcctcctgactttcagggccagtccggccgtcgcaacggatgccatggccacaagcaatcccgtagccaaagtcttcatatttccgtcgccgcccgtccccggcaacaccacccccggctgattctcaatattgccgagctgggcttcaagcacaaccgtcgaatccttcggaccgatggtgaatttgtgtgcggtagtgtccatgttgtatccgtcgggagccacggtttccatgagttcatactcgccccacttcaggcccgccaacttgaactggcctgcggtagcgtcggaatcatatggatcgccggcgttggtcggagtgcatgtagcatcgcaatccgtgatgttccaggtttcggcggaattcaaggatgcgaatgccgtcccgttccacacgctcacacgcttcagcgtccactgcgatccggaaagcttcgtgcttgtgcccgccgcaaccttcgcccacgttacggagccggtttcacgattgttgtacacggtttccgcagtcgcattggacttctcagcactatcgacgatcgtaaggtgaatttcttcgctcaccgaattcgcgtcgattacaaacgcgtacgtcgtgttattggcggcgaagccgtcacgcttctgctccttcagcgtgtacacgccccacggaagcccctcaaacctgaacttaccggcagtggaatccttgtcggcatacacgccatcgccaccgttgtcggtcaacgtatgcgtatagtcatcgcccgacacagcaaccatggaagccgtttcagcattccaagcctgagtctgggtcagcgtccaactcgtgcctccaagcaacgaatcatcgttggttgcggacgagccgtcatcaccggtgtctttcttatcccaaaccacaacgccgttcttgcgatcgtttggaatcttattgtctgtcggaagattcgattcgttcgtcacaatctgtccatcgcgaaccacaatcgtgtatgtcgtttccgaaagcacatatccggtaggtgccttggtttccttcagcgtgtatttgccgttatccaggctgacgcggaacttgccaacgccggaatccaggtccgccttcgtcgagatcgtttcctcatcggcgatcggctttgcgaagtttgctgcaataccgtccgtttcgccgctcttcagcaccgcgctgtacacgtgggcgttgatattgcgagccgcaaccgtggaaacattgcaatcgctgatggcgggaaccgttgttgtcagcgttcctttattaatggtcatcgcctcaacgtagccgcccgaagcataactactattcgaaccaccattgttgtcccagtcaccgctgccgaaatggaaagtaaccttgacttccttgctatccggattcgcaatctcgtatgaataccagtcgttgcatccgctaatggaagacatagcagggtcactgtttacatcgtttgtattccagttgtcgccgaccgcgtagtgaatctgcggaacacccgtcgcatagtaatacacgacagtggacttctgcttcaccgtaatatgcacggtttgcgacagattacccgcctttacggtgatgtcggcattgcccgcgctcactgcggtaacaagaccattgtcgctgaccgtggcaatgccagtattggagctttcccaagtcaaagccgtgtttgcaggctgcacttccgcagccaactgcaacgtgccattgtacttgagcgacacggtctgatcgacaagactggttttgttcgtatcgccatccttgtacagggtcagggaagctgcggaatcgttggtgacagtaacgttcagcgtgttgcacaccttgctatcagacgcggagcagacggtgaacgtcgtgctgcctttgccgactgcgatgacgttgaatgtgccggatccttcagcggacgaaatacgagccacattctcataaccgtcggcaccagtccacttcacctgctggctggcatcgctcggatcgaccttcaccgtgatcggagcggtgtcgccgcccttgtccaacgtgaggtcggcgatcgcgttgccgtcagcaccaagcagggaaacgctggtaggcgtggtcgtgttgtcggtaatgttccacgtttgctgcggatcggtatccgttcgtgtcagctgccattcggaaccggcaagggcaccgctattgctcgtgccgtcaaccttcgaccaggcgagttccgtgccggcggtttcattgatgatggcaccttcggttgtcagcagtttcttgctgttgtcggtgatctccgtaccgtttgcgtcatacaccttgacgattgtggttgcgtcgattccgccttccgcagtatcaatgcggtagatgttcgtattcttcgcatagcctgaggctgccgcctgttcgcgaagatagtaagttgcattggttttcagaccatcgacctgcaacgtgccgtcagcagaatcccaatcattgccgccgttgtcggtgagtgtgatcagggcgccgctgttattgattgcatttcggagatttccatacactgtccaagtcgtgccgccgagcggagtcgcggtattgcccgcaaccttcttccaagtgatggatgcggagttgttgagtgcaccactccacgggaagttgtgacgttcctgatccatatcgatgatggacgcagaattaatatcaccgccattatgcttcgcctgagtggggttgtacatcatgaaatcgtcacccacatacacgcgaccattggtggtcacatgcgattcaaggctaccgtccggcaccataatgctgccgagcattgctgcggaaggatcgtcggacacggaagagttgaaaatcgaagtaacactcgcctggctccaattcgtaccatcggcatgaagcttcttcaccgttgcattatcggctcggccgcccatgatggtgactttctgagccgtggggaagttccacatcagcttctgggaaaccttcgaataggtatcggcattcgagtcagcgctatatggaatctgattattgttgccggtcttgccacccatgacgtaaccgttggaaatttctttcgctcccgcagtatccgggtcattatagttcgaagcgccgccccaccagaagcgccagccggtacgcatctgaatctcattgctagggccattttcgttcaccacgttgatcacaacggacgcatcgtccggaatattacggaaccaaaaatcaatgcccttatcagtattcagctcggaagcctgaaccgtaaatacctgaagcttggattccttgtctccagtgaacgtaatcagcttttcatcaccactgttgaagctcatctgcaacttgtatgtgctgaagttcttctcggacgaaggatgattagtgttccaatgatagtcggaatgcacatcatcgttgtcatacgcggaatacttattccagtcatacttcttgcgttcgtaattctgctgcgctggagcatcgccatactcgacgccgccagtatccttcagagttgacagctgcttggaattggacttgaacttgtcgccgaagctgtcaatcgtgttgccctgaccgtccttgacattgctccagtccgcgtaattccatgtgacatcgctatcaggcgtggtgccagagccgtacttgtagatggaactgcacgttaccttactacaagaaggcatgccccacaatgtggttttattgcctccgacaacgccttggtaattgccgctgatgccagcgccctgcgtcgtgtcgatgccgcttgctgacgacttccaagcttgggcggtactcgcaccagataaattcgtgttggtaccctcgactgcgataatagtactgccagcagcaggcttgtactgtgcgccgaaagctacggtgccgatggtgaagaagcctttttgggcgcgctgcatgtacttgccgagaatgaaggtctgaccttccatttccgcagcccaagaaccgtgaatagagccatcagcagtgccggtttcaccgtctgtgggcgcgccaacgtagaaatctctgcctacgtatgtggcaagaccggtatccgcctcgttgacgtcagtagagccgtcgcccatatggatggtgttcgacgtggcgaatgcgccatcgtccttgctttgatcggcattggcgctgtaggtggggatgaaggcggtgacggctacggaggccatcatggcaactgcgactgcggcggcggtcagggagcgggcatgagagaaggcgcgggcagataccactcgcgctcccgagtaatgctgtggcgccgagctcctcgctccgcctctgagcaatctcttcatcatgtcccctaactgcacgaatcagacccccctcagacattccgactctaacacgacatcctttgcaatatgccatctacaggagtggcaactacgccactcaacctttttctttctcccgcaccttgtgggtacggctcaaaatgataacctttgcattcatgaaaatcactgaaacaaaaataccccccccccgatataaaggtggtaaaacctttattttccagtaccgaagcgtccaatccgttctgccaactggagtttgaaatcgttcgcaaaaacgccgaggttacccctgcaatcagtctttgttaatctaaccgataccctccacggcgtgtcgcgaaacaaatgattgcaaaccgtttcattcattgcagaaattttcatgaaaataccccctagtacacccgtgtaccacaccccaatttccccgcccccgccgcccatccacactcgttacaatcaacaatcacaaatcaaccatggaaatctcataacctcgcaacaggcggcaaaacctccgaccacagggataaattttcagggctcgcacactctccaacagctacatatgagacaagggcgcgtaagtgatcgagccgtgacaaccaaggttgcgaaatgaactatgatgatggttgcaagccccgcatcctacgaagacggcaagtacccgagcgaaaccggaaaatccactccggatcgcacctcgacgcggtcggcaaaaagcgagtcaccgtcgtctacgacgcccaagacacgcaacggaacttgtgcagacaccaccagcagcgttgcgcagacggcggcagctggcagcatatgcaaaatacccccgtattgtcggcgtgaatcaaaacggcaagtacggaggcatgaagaagagtggcagaaaaatcagagatctccgccgtagacggagtcggtgccgcggagcacaagctgggcacgcaccacctcatacggattttcgagagtctcccccgcaatcagcttcacggccttccgcgccgcggcacgacccatggcgaacggatcctgacgcatggtcgtcaggttcacggtgtcggcatatgcggaatcgtcgaagccgatgatcgaatagtcgcgcggcgtgcgatgcccataccggtcaaggcgcagcacgagcggaatcgccatcatatcggtctggcagcaaatgccgtcggggaactcatccaacgcaagcagcgcggtcaacgccgaatcggcgaacgttttgccgcgcggcacggaaagcacgcgccacttgaaatcgtgcgtgccctccatggtcttgcatgcgcgaatgaagccctgcccgcgcgcatcgatcgacgaattgatcgaatcgactgcatcggagcacacgtacacaatgtttttgtgcccaagattgattagatgctgcgcggacgagaacatgccgtcttcatcgtcgatggagatcgttgcgtcgaagccttcctgcgatggcgtgttgatgccgatgatcggcacatgaatacgttgcagctgctggatttcctccggttcgacgccgaacgacgttacgaacacggcgtcgacgttgcgtcgcaccggaagattcgtaaagaagtcacgcctgttctcaccggtatcgacatgctggaacagagagatgtcgtatccggcatcatgcatgacggaattgattccagcgaatacttccatattgaaccagctggtgatttcctcattcatcagcatggcgacacggtacgtttgccctgacttcagtgccgtcgcggaacgggagatattaaaatccaaccggtccgcggtgtcgagcaccttgcgcctggtacgctcggaaacgagctccggacgcgtgaacgcgcgcgaaaccgtcgaaatcgacactcctgcggccttggccacctcacgaatgccagccttgtccatgtcagcccctttgcagctcacagcatcatcgcaaccctgccaacagtggaacgggtggtatttggagcgacgacgctctctcaatctgctttcattatagtgcgaacgttgtcaaaactctcgcaatatgatcaaatttcatgcgacagccgcgcaaatcagcaaaattaccggatagaaggcatagaacatccacttagtccatgaatgtttgtatccgagtttgccattgtagtagtgcacgaatgcaacaccgacgccaggcgcaatcatcatcaccgcaccgaacagaccggccgtgaacatcatggtgttttcacgcgagcgcatcagccagaaaatcagcacgaaaccaagcgtcaccgcacccaggctcatcagatgctggcgcagtccgacacgcaacagcagatcccacaatacggcaaccactaccagcacaatgtcggagatcacgagcatggcaccttggtagcgctgcgccacccattccattgctgcgagcatggcgaaggcgatgaacaggccgaacaccggattctgcgagccgaaatcgaacggcttgcccgaagtggcgagatcgtacggcacttcggcgattagtgccaacaacagcagctgcacgccgtatgccacgcgattgtgcgtctgctggaagccttgcaccagcagccacgcgtagatcggcgcggcgaaccacgacaccacttcgcatagcaccatggccgtgagcgacgtcatgttgttcgtgtcggatccgaaaatcagtggcaccagcgtggtactgccggcggaaagcaccagcgccaccgcgccgattaccttgagctgaaatacgctcaatccgcggcgctgctttttcttgcggcgcatgcccgcaaagccgatctggtcggtgacgtcggttccggcgccgttttcggtgtagccttccataagtcctcctcgagttttcctcgattccatcgcgcaagcaatcatgcgcgcacgtaatcgtctgcgcacactgtgccacgtcacgacattacgccgcggtatcgcgttgcggcatcgctgccatatgcggagcttcgcgtctcacgcgcttgcacagcattccgcgcaatatgtttttcacgtaacccctgtgcgacatgtttcacgcgattgtttcacactatgtctttcgtgctttcacgtagctttactcgcatcatcttgccattgttgcaaaaatcctgcgaacgtatgctgcaaatgtatgcaacataccttacacgctttacgaaaggtgacccccgtaaacgtggcgcacgccgcgcaatacgcgcaacgcaacgcacgccccgcaatacacgagcagtacgcacgcaatgcgaaagatcaggcgttcagcacgtaatccagcaatccttcataatcggcacccttaaacgaacgcaccgcataactcgacgcatccggatcgtcggccggcgaaatctccgtgcggaaatacacgccgtcgatgcccgccgaacgcgcaccgacaatatcgttcttctcgtcattgcccaccatcagcgcatgcttggcggtaacgaattcacggtcgagcgccagcatatacaaatcgcgcgcgggcttgcgaatcttttcctcgctggagatgatcacgtcgtcaagcacgctggcaagtcccgtcatttccaactcggcacgggtatagcaggattgcgcgttgctgagcagcgccacgacaatgccggcttcctgcagtttttcgatcatttccagcgcacccggatacaggcggatcatgctggtgctaccctgacggaacgcccacgcggccttttgagcggcctgcggcaacgccagcaaccgttccgcctcgtcgttgcgattcatgagcagcgagcggtacaccggcagcacgtcgaactcgtcccacccattgcggacgatggcatgattcgactgatgcagcatttcgcgcgcctcaagtttttcgaaacgttcacgcagtgcctcaaccgaatcgtattgcgctccaagctcgcaagcggtgtcatacaaggcctgccaggccgcgtcgcactgttcgtcggtacgtatgtcaataagcgttccatacagatcgaagaacacaacctcgtatttaggggtatgcgtcacgttttccatagcaggtcctttcatcggcatcgtcgccgctttaccggcggcggcgattgccactttgcagccgctgcccttgcaaaccaatgcgttacatgcgttatgcacgaggttaccgcaaccgccagattgcaaacgtatgcggtggcacgatcaaataatcgccatctcccgcactgatgcacgccgcgcatgcgtttgtggacgaacccatgccgcaccacacgcgagacgactccgaaaccggcgcaaccgcagtcgaggcaacgtcaatcgcgccaatatgacgtcccggattcaccgccaccaagtagtcgccgacccggaacaccagttcgtcgccttccacgctgacgatcacacgatcgccgtcaaaccattccgccgagctcttacgcaaggcgatcagtttcgtgtaatactccaccagatcgcgcatgcgccaggcacgagtccaatcaagccaattcagctcgcgcgtcgaatcgtacgaatcggaattgccgtatttcgtacgcgcgaactcctcgccagacagcatgaacggaatgcccgcggaagtgagcacaatgcccgccgccatacgattcgcatccattaccgtggccatggccccggcaatcgcggaaccggccgaggcgagcccagattccgaaagatcggcgtcatacaacgccttcggcacgtccacggaattctcgttgtcgccttcactaacggcgctgcccagcgatttcgcggcaagacttgcgcaaagcttgtcccacaaggtcagatcgtcatgcgcggaaacatactggatcacttgacccgcaacaccttccggctgtttgctggcacgccaggcgttcaccgcgtcgcgcacggaggccgcattctcatgcatacccccgttaacgtatccgggacggtccgagaagaacacatgccccttgatggcgtctcgcgtggtgtcgcaaaaatgcccgatgcgattatcaagctgcggcaatccggccttgtcggcaagcacggtgcccggcaaagccgcggtagcgccggccgaccacggttcgccatacataagaatgctcggcccacggtcggggatttcgtccaaagcggcgcgcacggcgttcatggtgtcgacgtcgatcaggcccatcaggtcgaatcggaagccgtcaagatggtattccctcgcccaatacgccacggattccaccacaaaacggcggaacatcgcacgttccgtggccatatcgcatccgcatccggagccgttcgacaacgccccgttcggcttgcggcgcaggaagtattcgggcacgatgcgctcgaaccagttgtcgggcgagaacatgtgattgtagaccacgtccataatcactttgatgccggcattatgcaacgcctgcaccatctgcttgacctcgaggatgcgcacggacccgtcatacggattcgtggagtacgatccttcaggaacgttgtaattgacgggatcgtaaccccagttgtatcggctgcagatcgtttcgtcgacggaaccgaaatcgtagatcggcatcagctgcaccgcggtaatgccaagctttttgagatacgacaatcccgtcggaaaatcaggatgaccgtccaacgtcgttcccaggtcggtgaacgcaagatattttccacgatgggattcggggaatcctcccgcgggatcgttgctgaaatcgccgacatgcgtttcccaaacaaccgtttgcgcaatcggcacttccggcatgcgatcggcatcccaaccttcgggatcggtgcgaggcaagtcgacgaccatgcttcgacggccgttcacgccagccgcgtgcgcccatggatcggcaacgcgatcgacggaaccgcaatcgcgttcaatcaaaaaatcgtaatataagccgtgtttattatcggcaaaatcgtaagtccaagagccatcggcctcgggacgcatcaaaaactgcccaattaaagcgtcgccgtcttcccccttggaaccgcgcgagaacaacctcaacgttattttctcggccgttggggcccaaatggcaaactgggtgccggattgcgaaaccacggcacccagcggccgttccagacaaagcgggaacggttcggcgactctcgtattcggctgttcgaaattgttttcgaggctgtttacgagcgtcattgcttcccctttttctaactgttatcagcccttgacagaacctgacatggactcctgatagaaacgctgcatcacgatgaacaggatggcgatcgggatggagatcacgaccgcggccgcggcgaagcgggcgtaccagttctggatgtattccttctgcagcatgagccacaggcccaatgccacggtgtagttggactgcgtgcggcagatcaccttggccatgacgaagtcgagccacggggtcaggaagccgatgatggcctgatagacgatcatgggcttgcagatcgggatgatgatcttgtagaacacctggaaacgggtgcagccgtcaagcagggcggcctcatccaacgaggttgggatggtgtccatgtagcccttcatcacgtagaatccagcaccggaacctgcggagtacacaagaatcagcgccacggtggtcatagcgccgcttgacaggcccaaggccttcagaatgaagtagatggcggtgacggccatgatgcccgggaacatgccgagaatcagcacgacgttcatgaaagtcttacgcacgcggaagcgcatacggctcatgcagtacgccaccgacagcacgaagatcacggagatcacgcaggtgaagcaggcgatgatgaacgtggtcatgaacatcttcgggaagtccagtacgttgcggtcggtgaacagcaccttgtagttgtccagcgtccattccttcgggaagaaggagctggtgtacggggcggtgttcttgttaaaggactccgcgaacacccacacgatcggcacgagccagatcacggccaggatggcgaggaacaggtgggcgaagatgtcgccggtgatgcggcggatcttctggtcatgcaggaagccatggctttccactttggttgaggaatgcttgttgctcatcggaatgcctcctcattcttataggagccggaattgcggtaggtgatcagcgagaccacggccaacacaatgaaggtcatgatgcctatcacagcgccaaggttgtagtcctgcttatccacggtgagcttgtacagccaggtgatgagcagatcggtggagcctgcggaatcgcccagtggggtaggatctccgctggacagcaggtagatgacgttgaagttgttcacattgccggtgaaggtggtgatcaggtacggtgtgagcacgaagatgatgtacggcatggtgatcttggtgaagatctgccaccagtttgcgccatcgatcttcgccgcttcgtactgatcggcaggaatgttctgcagaataccggtgatctgcatgatggtgtacggaataccaacccacaggttgatgatgatgacggtgacgcgggcccaggtggcgttggtgaagaacggcagcgggccgtcaatccaaccccacgtctgcagcatgcggttcaccgcaccctgcggctggagcatagtgtgcatgaccagcagggatacgaactgcggaactgcgatggacatggagaagcaggcacgccaaaaacccttgaagtgggtggtcttacggttgatgatcatggccacgaacatgccgaagaagaagttcaggaaggtggcgaagaaggcccagaccaatgtccacaccagcacgcgtccgaacagtgctgcgttaacagtaccgccgctgttggagaagaccttggcgaagttttcaaagccgacccagtggaacagcacgaggtgcttgtggtcgtagctggtgaacgccatggaaatcatgaaaatcaacggaagcacagtgaacactgcgatgcccagcgtaggcaggaacatcagcaggacatgagccttggcgtcgagcagttcgtgcacatcatccatgaagctcggagccttgccgttctcttcaagcagcacctgggacttgtatgcggaacgcaccgacatgacccacaggccgacgaaggccacgcagatcacgagggacgccacgccgtagagcaggatgaccacggaacgatccgactcgacatactgccagaagccgtcaaccagtttcttgccgcccttgttttcgcccaagcttggcagcttggacagataaccaacgccattggtagccataaatacgaagaacgcgacttcaagggccagcatggcaatgcccttgacgtactgcttgcgcacgatgtttccaagaccgaatacgaccgcggaaagcttggtgaacacatcaccgtgggtcagcgcagccttgaccgtgtacggcgacgggggaacatagtcagcgccctgcttccggcggcgcttcatttcccgaggggaaagagtcgttgctgtcatttcgaccgcctctctagattttgaacataaaaaagctttgcttccggacaaggggaaggagaatttgaaaaaccttgcccgggaatgcaaagctcggaggaggagtgagccattgcgccgaaagggagaaacaccatgactcgaagcgttgctcatatgcgccgggtggctggcgggattcggcaaaccagccacccgacgcttttcagttattggtattgggtttcaggatttcactcagcgatggtgcccttggtctggtcaatccagtcctgatacttggcagcagcgttgtccttggtgatttccttgttgaccagggccttgccgaaggtctcggccggggtccaccagtcgttcatgccagccaggccggactgcaggattgcggtgttggccatggtgtcagcctgagccttggcagcgatgtcgtcggtggtcaggtcggacagggaggtgtcgctcggcgggatctgacgcatctcgtagtgcagcttctgggagtcggtgttgccgaggtaggctgcgaactgagcggcggccttggtgttcttggcgttcgggttgtaagcgacagccttggtagctgcgaaggacttcatctgcttcttctcgccgttcacggtgaaggtcggcagctgagtagcggcgtagttgtcgcccagggcttccttcacgtcagctgcggaccaagtgccggagaacagcacgtcggcggagccatccttaatggcggcaaggccggaagcgccgtcgtcgttggagaagttcggattggcgaccacatcgaccagataagaagtaatatcggcgccgtccttcgggaagaccatgcctgcatcggcgtcattgcccttctcgccaaacaggctcagaccatcatagaagccgttgatgtaccaggaattttgcagggggaaggtgaccttggccttggaaaggatggtatcgaagtccttggcctcatcctcggtgatcttggacttgttgtaatacatgaaccacgtgttgtcggtgtacggcacaccgtagagcttgccatcggtaccggtgacggaatcgacttcgaggtcgccgttctgttccttcacctgcttctcggcgtcggtacccagctggccaatggccttggcgtccatcagaacgcccaactgatcggaagcgaacatatagacatcggccgcggcggacggatcggtgctgacctgcttggaagcgtcaccttcggagacgacgtcgttcttccaagtgatgttgtactctgggtgatccttagcgaagttctcttcgacctggcccagccaattggtatccttggcctggtcttcctgcggagcccacacgctcagggtgatgtcctcggtgccggaggcaccgctcttgccatcgccgtcggaggagccgccgcatgcagcgagcgggaccagcattgcaacagctgcggtaagtccgattgccttcttccaatcgatcttcattgacctttcttttcctcacataaccttgtgtatcttcagcgcaaccggtaccgaacgtctgatcaaactccgcatacgttcgcaccatcgtctttcaagcgggtgttgtccgtctttggagctaccggatgtgcatcagtgattgcaagtgtagcacagttttgccaacgtttgcaatctgacgttaagattgtttcagcagttgccggaaaacacgtttattccaaggagacacaccgacatgatttccccttcgacacacccctgtccacaatggctctccaacgcgatcttctacgagatctatccgcaatccttcgccgactccaacggcgacggcatcggagacattcccggcatcaccgcaaaactcgactacatcaccgaccttggctgcaacgcgatctggctgaacccgtgcttcgattcgcccttcaaagacgcgggctacgacgtgcgcgactacaagaaggtcgccccccgctacggcaccaacgacgatctggcggccctgttcgcagccgcccacgagcgcggcatgcatgtaatcctcgacctcgtgcctggccacaccagcgaggaacacgaatggttccgccacagcgccgaggtggatcacaacgagtattccgaccgttacatttggacggattcctggatttccggcggtgacggtctgccgttcatcggtggggaaacgccacgcaacggcacctacattctgaacttcttcaaatgccagccggcactcaactacggtttcgcacatccccagcgcgcatggcagaagcccgcgttcggcccggaggcgatcgccacctgcgatgcgatggtagacgtgatgagattctggctttcgcttggcgcggacggcttccgcgttgacatggcagacagtctcgtcaagcaggacgacgccggcaaaccgttcacgattcgcacttggcagtacatgttttccaagattcgtccggaatttccagaagccgcgttcgtgtcggaatggggacgcccgaacgaatcgctggaagccggtttcgatatggatttctatttggattggcgctgggacggcattccgaacggctacaacatgctgttgcgcaacgtcgataatccgttgagcagggatggcgacaaaagctatttcaacgtggattcgggcacgccgatcagtgattttctcgagcagtacgaaccgcagctgcgcgaggcggaacacctcggaggcaccttcaatttcatcacctgcaaccacgacaccgcgcgcgtggcaccacgcctttccgagcgtgagatcgccctggcatactgcacgctgttcgctatgccgggcgtgcctttcatatattacggagacgagatcggcatgaggtaccgcgacctgcccaccaaggagggcggctacgtgcgcaccggctcgcgcacgccgatgcaatggcagagcctcgcctcgctcaacgcgagttatgcgacgccggccatcaccggcgggaactatcttccggtcgacccctcccctgacgcgcccaacgtcgccgactcccaatccaacaaagcctcactgtggtatacggtgcgccgcatgctgcatctgagggggaattgcgacccccttcaatcgagggcatccttccatccgatctcacgcagaaggctgttcgcattcgagcgttcgaccgatctggaacgagtgatcgtggcggtcaatccgagcacaaacagcgaacgtttgcaattaccgaatggtcactatcgaaagattttcgaaatcggcgagaccaaggtcgatttcaacactttgaccctcggtacgcaaagctttgcaattctgaaggcgaccgcatgacccattccgagcagtgccgtcgtcagcttcaacgaaacatgccgtcattaccatggcggcaacgccatcgcacttcggaaacagcggtggcaacgacggtaggacggcagtcatatccactttcaaacaccttgcaaacgataagcaaacagaaaaagcattttcactatctaacgtctataaagtagttaagaaatcgcaatacttcaacgtttacacccaataacacgcctattgaaaacgatgtcatcatatgctacagtacatagcagaacggttggcatacgcaccgaagcgcgccaatcgcgtggcaatgcagcatcatcggccagcaacggccccggaaagaaggaacctatgacggcaacccagcaaaccgaaagcgcggaacgcatcgcacgaccgcttattcagctcgccaaactcaacggcatctcaacgtcgtatatcgaccagctcggcacctacgtggaaatccgcgacgaagtgctcgtctccgtacttgcggcgctcggcgtggacgcatccagcgatgaagcgatcgcggcatcgtacgaactcaccaagcagcgcatcgcagacacccttgtggaaccgaccatcgtgaagttcatcggcaaggaagcgaccacgccgatccgcgcgaagggccacgacgtgacgctacgcctgttgcttgaggacggcacgcggtatgagggcaacctgtgcatgtatttggccccgcagaccgacggctcgctcacgctcaccctgccggacgacattcccgccggctaccacacgctgcgcgtcaacgcgggcccgctgcacggcgaggcgcgactgatctgcgccccggcacgcgtaccgctgccgcctgcggttgccgaaaagcagcgttggggttggatggcgcaaatgtattccatccgctccgccgaatcgtggggcgtgggcgactacggcgatctgaagctgctgctcaccgacgccgccgaaaagtcgcatgccgatttcatgctcatcaacccgatccacgcaaccgcgccggtcgaaccgctcgaaccgtcgccgtacctgccggaatcgcgccgattcatgaacgtcacctacattcgcccgcaggatatcgaggaatatgcggggcttgacgaggccgcgttggccgaagtcgagcgcttgcacgccgaagtcgctcccgccaacgacaatgccgacgaactcgacatcaactccgcgtggtggcacaagcgccaggcgctgcagctcgtgttcaaggtgccgcgttccgccgagcgtcaggccgcattcgaagcgttcaaggaggcggccggcccggatctgcgcgcattcgccgcgtggtcggtggccttccagatgtggggcgccccatgggagggcacatggttcgcggagacgaaccgtgattcgccggaagtggccgaactcatgcgcgatcatgccgacatggtcgaattcgaatgctggctgcagtggatcgccgacgaacaggtgaccgccgcgcagaacgccgcacgcgaaagcggcatggcattgggcctcatgcaagacatggctgtgggcgtgcactcgctgggcgccgacgtgtggtggaatccggaacgcttcgccgtcggcagcgtcaccgttggctgcccgccggacttctacaaccagcagggccaggactggggccagccgccgttcaatccgaactatctcgccaaaaccggttatggcgtgtaccgcgaaatggtgcacaacatgttctcgcacgcgggcgcggtgcgcatcgaccatgtgctcggcctgttccgcctgtggtggattccgcagggcgaaggcgcacgcggcggcgcatacgtcacctacgactatgaggcgatgatcgcgatcctcacgatcgaggcttcccgcgtgaacggcctagtggtcggcgaagacctcggcaccgtgccggattacgtgcgcaccgtgcttgccgagcacggtctgctcggctgcacggtggaatggttcgcccgtgtggacgactcccccaacgccggcgacccgtatgccgatccggccgattaccgcgagtatgcgttggcatccgtcaccacgcacgatctgccgccgaccgcaggctacctgcagttcgagcatgtcaagctgcgcgaagaactgaacctgctcaccggtccggtcgaggaattccaggcgtccgcaaccgcggaacgtcaggccatgcttgaccgactggtcgaaagcgaactgatcacgccggaaatcgccgcggacgtcgacgaccatattcaagagatcgtcgaggcgatgcacaagatgctgctccgctcgccatccgtgcttctgcaggcggcgctggtggacggcgtcggcgaaacccgttcgcagaaccagccgggcacgtccagcgaatactgcaactggcgcgtgccactggcaggccccgaccacaaggtggtgcacaccgacgaagtgttcgacctgccgcgcgtgaagtcgctttccgccatcatgaacggcgaaaagtaatttcccaacagtaagatttcctcacacaacaccaaaaaaatacgaaaagttccgtcaaacacaatatttgacgggacttttctttatttccgttcgtttttctgctcgatcctccatttaatgacaacgataacaggagatttcgcaacacatagcatgccgtaaacagatttacgcatgacaacgattgccgcaccgccgagtagactggtacgcatgaagttcctatcacccgactccggctttatgcgcggcctcagtgacgccgtcgacgcgatttggatcaacatcctcatgttggtcaccagcattccgatcgtcaccatcggcgcggccttgaccgccggtcacgatgcggcacgacgctcgctcgcaggcgaaggcaccgtcacccgcaattatttcaccgcattccggtcaaacttcgtaaaggcaaccggttattggctgattttcggcattgccggggcgattagcgtgtactcatggatcgtgctgcagatcacgccgctgctgattccgaaattcgcgttgagcatcgtatgggtcatcggattcgaatggatatgggcattgcagtcacgcttcgaaaactcgttctggcgcacgctcggcaacgccttcgtattcggcgtgagcaatatcgggcacacgctcggcatggccgccatcgacgcgatttacatcgcgcttttggtaggcagctggttttacatgccgcaaggcctgttcctgcttctcgttttgggctacggcaccatgattatgattcatgtgccgattttcgagcacgtgttccgcaaatatatgaagtagttttcggattcggatatgaaagagcccggccttgcggccgggctcaatgctaccttcacgaggcctatcggcctcgtgaaggctggtgcatgggacagcgcactgcgctgtcccacaagggatgatcgaagatcatcccttgactgcaccagccattacacccttgacaatgtgcttctggcagatgaggtagaagacaataatcgggacgatggccatcaccaggcaggccatcatggcgcccatatcgacggaaccatagccgcccttaaggtactgaatagccacggaaatcgtcttgtacttgcccaaatcgagcgtcaggtacggcagcaggtagtcgttccaaatccacattgcctgcagaatcgcaacagacacgatcgacggcttcataatcggcaccacgatctggaagaaaatgcgaggcacggaagcgccgtcaatcattgcggactcttccaacgactgcggaatgcccttgaccacaccggtgaagatgaacacggccaggcctgcgccgaatcccaagtacacaatgcacaagccccacggagtgttgagcttcagcatatcggcgagcttcgaaagcgtgaacatcaccatctggaacggcacgatcatgttgaacaggaacagcgtgtacagcagcttcgcagcccagttgttcacacgcacgatccaccatgcgcacatcgaagtgcacaccaagatcagaatcaccgagccgaccgtgatcagcagggtccagccgaagctggcgaagaaattcgtgttttcaatgccacgggtatagttttccaatccaacgaacgccttgccggtcggaatggagaacgcatcacgcgaaatatacgccttctgcttgaaggagttgatgatcaccagcacgatcgggaagacccatgccagcgacaccaaggaaaacagtacggtccacaatccgccatgcttgaccttttctccggaaatcatgcttccacctccttggaagtcgtcagcttattctgaatcagcgcaacaatcgcgacaagcacgaagaacagcactgccttggcctgtccaacgccttcccagccgacacggccatagaaggtacgggtgatgttcagcgccaagccttcagacatgttcgacggagcgccgttcgtcaatgcgaggttctggtcatacagcttgaatccgttggtcacgcacaggaacgagcacacggtaatcgacggcatcatcaacggaatgatgatcttgaacatggtctgcgtgccgttcgcgccatccacggaagccgcttcaagcacatcggtcggcagcgactgcatgccggcgatgtagatgatcatcatgtagccgatctgctgccagcacaccagtacgaccagaccccagaagccgtacgtcgcgctataggtcagcgagcgcgcccagtgcgcgagaatgccgttgagcagcagcatccagatgtagcccagaatgatgccgccgatcaggttcggcatgaagaacaccgaacggaaaatgttcgatcccttgatcgccttggtgagcatgtaggcgatgaagaacgcgaccacgttgatcacgatcgtggtgacgatcgtcagcaatgtggagaagcccaacgcgtgcaggaattccttgtcctgcagtgcgcgggtgtagttcttaagccctacgaactcggcgtcggtaaccgttgtgaacttgcaaaagctcaggtagacgcccatgatgaatggaacgacgaatccaataatgaatgcggcgaacgttggcagcgcaaacagcgcccaccatttccgtatcgccttgccagccatgctgatcatagcctgcctgctttctttccttctccattccgatcaccgcggcaccgcggtgcggaattcctgcaattgttggccgaatcagcggatcactgctctgttctccacctttccggtatttacactcgtcatgataaacggcatgacacgaaatgtcaaacgttgtcatttttacatgtcttgagacgcaaatttaccaacgttgccatgtttttgattataaaaactcgttgcaatatcaagcattttaagcctcttctgctataatgaaaacgtttgtaatgcatgtattgcaaagatgtcgcaatacagtatgttggaacgtaagcagtcacaaggaaaaacatgaaaagcagtattcaagatgtagcgcagcttgcgcacgtatccgtttcaacggtttcgcgttccttcacacgcccggatctcgtgtcgaaagccacccgagacaaggtgatgaaagccgcggacgagctgaacttctccatttcacgttccgcagccgcgctgaaaaccggtcgcgcgctacgcatcgcggtcctggtttccggacggctcaacctgtggttcagctcatccatcatcgaaggcctcaaccagatcttccacgacgagggatacgacatttccatctaccagatgtcgagcatcgaggaacgtcgtgaattcttcgacatgctgccggtgcgccgcaacgtcgacgcggtaatcgtcatttccttcgatatcgacgccaacgagatcgatcagctcaagtccgtcaatgtgccaatcatcggcatcaactcgagtctgccggaagagcgcggtttcagcgcggccgtgcgcatcgacgacaagcagggatccgagcttgccgcacgccatcttatgacgctcggccaccgtgacatcgcctacattcgcaccaaccgcgaagtgacgctccacttcagcgtgcagggacgtttcgaatcgttcatggcgtgctgccaagccaacggcgtcgaaccgcgcgtgctcgtcaccgacgaaagcaagaacaacatcagcaaagtcgtgacgcagctgctcagcctcgaccatatgccgaccgcgatcgcctgccaggaagacggcatcgcggtgccgctgctgttccagctggaacgcaacggattcaccgtgccgaacgatatttccatcatcggctacgacgacagcatttacgcgcgcgacctcggcctgaccaccgtgcgccagacgcctgtcgaaatggcgcaggaggcggcccgcatgacgctcgatctcattgaggagcgcccgcttgacgaaccgttcaaaacgttcccggcgcagctgatcgtgcgttccactacggctcgtctgcatcgctaaacgatccgaacgagcaccgttcgcatagcgtctgttttttgctgccatgttgcacttcaccacttcgtgacagcgcttacatttctgtggtacaaatccatgaatctacagcgtgttttcgtctaaaatcagggcttttagtatcatggaagcgttaatcattttcatcaaaggagacacatggccaaaccgaccatcgccaacgtagccgaattggcaggagtgtcgcaagccaccgtttcccgagcacttcgtggcgcgaccaacgtcacagaagagacccgcatcaaagttcagcgggcagcggatcaactcaacttcacactctcaaaaagcgcttccgccctagcatccggaaaaaccatgcgcgtcatcctcctggtctcgggcaaactcaacgagtggttcaattccggagtgctccaaggggtctacgaggagctcgcgccggtcggctatgacgtcacaccggccttcatcaccgaccgcagcgaactggaccggttcttctcccagctgccaaaaagccgcaacgcggacgccatcatcatttcctcatttcagctcatgcccgccatgcgcgaccagctccaagccatagacctgccgaccgtgggcgtcaacgttcctgcggaatcgggttatttcgacgcttccatcagcatcgacaactccagtgcgatgaccatggccgtacgattgctgcgctctctggggcataccaacatcgcgttctgcagcgactacattccggccgacatggtctacaacaccagccaacgcacccaggcgttcgcggatgccgcacaggccaacgccaccgatggaatcacattcagcctgcttacggccgacgcgcacgatgcgccgctgagcaaatccgacctcgcctcgcaactgaccgcgaaactgctatcccttccggaacgccccaccgccgtctgcgtggaaaccgaccaagtcgccatcgcactggtcaaggaactacgcaagcagcagctgaatgtgccggaagacatttcagtgctcggctttgacgacgctgaaatcgcacaggcagcggatctttccaccattcgccaggagccaatcgagctagggcgcatagccggtagaaaagtgctgcagctcctacgtaacgaacctcttgaacatccgcatgaactgcaggatcctttgctggtgttgcgcaacaccacaagccgcattgacagcggggcggcgccggcggaataaatcggcgtcataaatcgacggcagctgaataaatcgagaggcagcggaaaaacgtaaagccgccaaaacgcgaaagcggcctgtatgcatgaaccagatcatgcacacaggccgctcttttcatcgcaagccttgcagggcttcaatcagcggtgcgatctcacccctgctgatcgaatttctgcgcttgaggaacggatcccaacgattcctcgttgttgttccattcggtggcccagccgtcgacgtaggcgctcttcaccttgctccaatcgccggtgccctgcgcgtattcgataagcgccgcggcgacgtcgtcctgccactgctgatccggaacggtgaagctgcgtacctcggtcttgccgtcggcagcgtaggagcgagcgatcttggtcagcggattatccggctggaactcatcgccatcgaatgtggtgaacggtacggagaagcccatatcctgggagaggatcttcttggcctcgtcatcggtgaccatccacttgatgaagtcgagcgtggcctgcttgtctttgtcggaagcgttcttgttcaccgcccagctggcgtcatacacgcctgcgggaccgctctcctcctcgcccttgatgcccatgtaatacggcagcatgccaagatcgtcgtccgctacttcgttacccttgatctgcgtgtaggcccagacaccgttcggatagaacgccacctggccaagcgcgaattcggaagtgacatcgtcgtacgtcttcgagctgaccaggctcggatcagtcgggctggtctccagctcgagatcgaacagatccttgtagttatccaagtaggtgcccttgatggtcttggagaacgtggtgttcatgtccttgtactcgtagtacagcgggatgcgccccatatgcgcggagaaacggtatgtgtcggaggcatccagacctggcgtcgcgaacgcgccgtcgacgccgagatcgtccttgtgctcgttgatggactcggccacggccttgagcgtcttgtaatccttgatgtcgtcggcgctcttgatcaccgcgtaatccttgctggcgtaatcgttgatgatcttcttgttgtagatgatgccgtaccattcagccgcgtatggcagcgtgaacgaatcgccatcaatggtgtaggagtaggccttgccgtcatcggtgagcagtttgtacgcttcggtgtcctgcaatggctcgcaatacttctgatattttgcgaactggtcgaaaccggagatgttgaacatggtcggcgcgttggacttggccagctccgagctcatggtcgcatcgtatgtgccggacgcaccggtctgcacgtccacctgcacaccggttttttcggtatacatttcggcgagctgcttgtattggtccacgacttccgacttgttgttcatgaaatacacatggcccttgtcggaatcagcgctgctgccgccgccgcaagccgccaacgatacgcccatggccaacgccgcggcgaccgcgcacgttttggtgatgattccctgcttcattgcttatctccttcgttggatttgttgttattcgttggacttgctgattttcgtggtagatatttgtacgtgcgccggcattgcttccggccgccgcgttatagctggagccagacggtggtgtcctgcggcaatcggccatcctcggtgagttcacccgacgcgaggatgacatcgccttgcggtagttcggccggacgttcgccgaaattggtgacgctcgcccaaccgttggaacgactgtaggcgatgactccgccgcgttgtccatccgcgccgtcccgcacgtcagatggacgatcttcgtccagccactgcagttcggtgtcctgcggcatcaggttatgcctcaacgacagcgccttgcggtacaggttcagcatggaattcgggtcggcatcctccacgtcgacggcgaaatccttgtaccatttcggctgtggtaggtgtggatcgtgctcggcgcccgcaggagagaaaccgaaagaaccatcgtggccgaattcgtcatcgggatcatcgagcttcggtgcgtctgcggcgacccagggcagcggcacacggcagccgtcacggcctttttcgatttgctcgcgcacgctgttgaatgcggtgggatcctccagcttgttccaaggaatatccgcgacttccggcagtcccagttcctcaccctggtagatgtaggtggaaccaggcaaggcaagttccataagaatcgcggcgcgggcacgcttggcgcccaattcgcggttctcctcataggtggtaccgtcgcgcagcagccaatccttggccagctgatgatgcgacgaggctggaacctgcggcaatccataacggctggcgtgacgaggcacgtcgtggttgctcatcacccaagtcgcggaggagccggaacgttccgcgctttccaagccttcctcgatggccaggtgcatgtcgtcgcgaatccagtccttcttggcgaactcgaagttgaacacctgtccgagctcttcggtcgaagcgtacagatgctggcgatccggattgacccaggcttcggccacggcgaatgccggcggattgtactcgttgaacaccttgcgccactcgcagtagatgtcatgcacctcatcacggtcatacaacgggtgcgacccgtccgagggaagcacatgctcgcagaccttgtagctttcgaggtcgtcgcggtcaagatccttggcgaggccgtgcgccacgtccacgcggaagccgtccgcaccatggtcgagccagaagcgcagcgtcttgatgaagtcggcgcgcacctcggggttcttccagttccagtccggctgctccttggtgaacatgtgcagataccactggccgtcaggaacgcgcgtccacgccggaccgccgaagcttgcgatccaatcagtcggcggctggtcgccgttcgggcccttgccgtcgcggaagatgtaacggtcgcgttccggggagcctggggcggccgcgagggcggccttgaaccattcgtgcaggttggagctgtggttcggcacgatgtcgaccacgaccttgatgccgtgctcgtgggcggccttggcgagctcgtcgaaatcgtccatggtgccgagcttcgggtcgacgttgcggtagtcgtccacgtcgtagccgccgtcggcaagctgggacgggtagaacgggctcagccagatggcatccacgccgagttcggcgaggtagtcgatcttctcggtgacgcctgcgatgctgcccaggcccgaaccgcgggagtccttgaaggaacgcgggtacacctggtagaccacggcctgcttccaccacaacgccggatcggtagtatcaatttcttgttgcaccatatgttttcactttcgttcgcatcgttgcaaaatgatagcggttacatttcttcaaactacagataagaacatttttaaatcaacatcttttctgcttgttattaacaatgatagcgctttcattactgcaacgcaatccctccgacgcacggcgtgtcctacaaccgtacgtcgccgcataaaaaaacgaactgcaatcaggagaggaaaggaagacttccgattgcagctcgttgcttgttcaattattcagttatgcagttattcgatcaatcacgcgccgatggtatttccgcgctacgcgacgcgcggaccgattcgtcatgcgcgattacgattggtttttcgagacgatcagtgagacgcgtcgtattcggtcttccaaccgtccacgaatgcggtcttgacggcatcccagtcgccggtgccctgcgcgtactcgaggagggcggaaccgagctggttcttccactcttcggacggcatcatggtgaagttccaagagactgcggtcttgtcagaattctgatcttcaacagcggcctgcaccagcggattgtcggacttgacatcactgaaggacttgaacggagtggtgaagcccatggcgctggacagggactcgatgccggtcttgctggtgacgacccacttcaggaaatccttggtggcctgcttatcggcgtcggaagccttggagttaatgcaccagtagttctcggagccagtggccagaccctggttctcctcgcccttgacgcccgtgtagatcgggagcatgccgatggactcggccttcatgccgttcttctgcagatcggtccatgcccaagtgccgttctgatagaacacggcctcgccgagggagaactcggaggtggcgtcatcaccggtcttggagctcagctgggtcggttcggtggtggaatccttcaggtacaggtcgaagatgttcttatactccggcagataggtacccttgacggtcgccggctgcttggtgatgttgtcatccttgaactcgtagtacagcggcaggttggccagatgggtcttgaagcgccaatcggagctggaatcgaaaccggcggaagtgaatgcgcccttaacgccgagctggtccttcttggcctggatgtcatcagccacggccttcagggtatcgaaattgtcgatatccttgacgtccttgatcttggcgccatcggtggcgatgtacttggccagcagatccttgttgtaaatcagaccataggtttccatagcgtacggaacgccaacgaccttgctcccatccttgagggcgacgtccttgttgatgagctgcttgtacggctcggtgtccgtcatgtcatcagtgtaggacttccagttctgatagccgaccggaccattgacctggaacagggtcggggcttcggacttggcgatctcggacttcagggtctgctcgtaggtgccggaagcagcagtctggaccttgacctcgacaccggtttccttggtgtaatccttggccagcttctgccattcgtcgttggattccggcttgaagttcaggtaatagaccttgcccttgccgtcgtcggagctggagctcgatccgcaagcgcccaacgtgcctacggacatcgccgcgatggcgaccattccaactgctgccttgatagtacgattcatcatcgaacctttctcttccattcctgtttcccagcaccccgctggtcaacatcctgtgaaatcgcttcctcacgattcctgacatgcactattgtgccgcatttctcccatttttgcaaacgtaagcaagaaaaaccatttttagagtgattttacgatcgcaggtttttctcaaaatactttattttcaacggttttcatcacactgtctttatgaaaccgtttgcgacacaccctccatatcacacggcaacaatcgcagtgaatcgcgaacctgacgccgtacggcaacaaaaaaacgtcggcggtttgtaaacgatgtcaaactaccgacgttcagcccagcgcaacgcacctagcaattccaatgctcgataacgttgtctcccttatattggctcagcacgcaataatgcgcggtgtcgaggcgcagcaaacgcgcgaaatgcggatcgacgtccagccactgcgaggtgaggatgcgcaacacatgcgcgtgcgccaccaacagcacgtcatgaccggcattgagcagcggcatcaccgcgtcgatcgcatcgcgggtgcgcgcggcggcctcctcaaccgtctcgccagggccattgtgcaccggaacctgctcgccgcttggcaacgtctcaacccagtcgccctccaacgattcgggaagggaacgcggaccgtcgcgccatacatcccactggaagccgccagcctcgctcacctcctggcgtgtacgcccttcggcacggccgtaatcccattccgcaatctcgtcaagcactttgaaatcgccataaccagccagttgcgcggtctgctgggcgcgacgcagggggcttgcgaacatgcagccttggtcgaaaccattggggaacgcctcacgaagacgctcgcccgccgcacgagcctgctcgcaaccggtatcggtcaacggaatattggttcggccggtatgctggcccgattcgctccacacagtctggccatggcgcagcagtaccaggcggccgggcgcggttgaagaagcatccttgcttccgacttgagtatctgtcatactcctactctagccgacgaaaagcgtttcaccagcaatcttccaccacgtgtcttaagcgcttcgcaacgcacgcatgcgccggcgaaatccaaccgaaatccgacgacacggtctacactggaaatcatgagtgaaatgcctgacccggaatccagcgcagaccgcatcgtagcgtcgctgcataacgtcgacgagaaagtgaatgccctgcgcgaacagcgaatcaacgatcccgacgatctttgcgacaagatgttcaaggtggccgcccccacgctggccggactcgtgttcggcaaactgttcgaactggcatggcgcaagtcggtcggccgcaaagtcgtgttgccggacggcaccaccgacaaacgcaaggaactggcgctgaatctcgtgttcggcgtggcttccgcaggactcggcgcgctggtatcgcaactatccgaccgcggatcgcaggcgctggtcgatcgccgccactcccgtcaatcgcgccgaatccgctgaaaccgtggaatccgctagatttgccgataagcgcaaatttcgccagatccgcaaacaatcccactccaacttccatatttcgaagcgtgcgattcagatctgcaattgaagctgcggttggaaccgcacgaaactgcacggaactgcgattggaaggaatgcgcttgcgggcgaaaatacttgcgcaattacgcggatgggatataaatagtcaacatgagtaatattctgcataatgcaactgtcgacactctgctggagcgtcgttccatccgcaaattcaagccgaagccgctgagcgacgatatcgtcgaaactctcgaaaccgtggcccagcatgccgcaagcagccaattcctgaacgactggtcggcaatccgcatcaccgatccggccgcaaagaagcgtcttgccgaaatcggcgggcagccatatatcgcgaccgcgccactgctgtacgtgtttgtgcttgacgagcatcgcaatgcggccatcgcagcttccaagggcgttgagaccgcttccgacgagtttacgttgaatggcagctatcgttacactcaggcacagaatgacgcagttttggcgcttcatgcgatggagacggccgcttattcgctcggccttggctgtgtgattctcggctcgctgcttaacgatgttccggctttgattgatctgctgaatcttccggaatacacgtaccctgtgctcggacttgcgattggcaagcccgatcaggatcccgcactcaagccgcgtatgccgcgctccatgcagttctttgagaatgagtatccgtcgaacaatgagacgttgcttgccggtttgcaggattttgacgaggaagtgcatcggtattacgatttgcgcaataccgagcgcccagttgatccgttcagcgatcagatcgcgtcgaatgcggtcgattccggtgtgaccagcaaggccgtggctccaaacgccaagcgccaaggcttccgcctcgagcgctaacggaactacttacgacgtggtttgtagccttttttgcgggaatgcggtttaatctgctgattgaagggcacgtacgtgtagctggattgtggatcgcgatgtgtgagatgccaggttccgcagaattcgcaccgatacacccatagttcagtgccgcgttcacgccaactctggtcggcggcctgccgggccgtcgctttgtcgcgatacatgattttgttcgattcgacgcagcgtttgggtacgaaataatgcatagttccccagtctattccaccatcggataagggcaggaagctcccctgaaattcctgggatcccccagcgtcccgggactcccagtgactggagcgatccgcccgccaccaggcctcccggcgtcccgaaacctccaatgggcggaggaaacacccgtgtgcgggaataagaaaaggggttcccggagcgtcacgcccggggatcccccggaaaccggaagacaaacaaaaaaagggggttcccggagcgtcacgctcgacgggaaccccgacgttgaatgcggcggcgtgctactctcccacaccctctcgagtgcagtaccatcgccgcgaccaggccttagcttccgggttcggaaagggaccgggcgtctcacctgggccatgaccaccgcaaaaccaatataacggccaaccccgatcggccggccggcaacggaaccagccacacgaccgattccggtcgtggcggtccgggaaccggacaacggacgcgaacaaccaaacgcttcaccggtatcgtttccgtgaccacaagaaacaatgctccttgccatccaacgaaagaaaccaccacaggacgagacccgacccaacaagcgggtcggaaagagtgtgccgcgttcgcccgttagtaccggtcggctccacccctcgcgggacttccacctccggcctatcgaacacgtgttcaacatgcgggctacaggcgctccggggagcgtcaaggaatcctaatcttggagcaggcttcccgcttagatgctttcagcggttatccctcccgaacgtagccaaccggccatgccgctggcgcgacaaccggcataccagaggtccgtccacccaggtcctctcgtactatgggcaggcctcctcaggattccaacgagcgcagaggatagagaccaaactgtctcacgacgttctgaacccagctcgcgtgccgctttaatcggcgaacagccgaacccttgggacctgctccagccccaggatgcgacgagccgacatcgaggtgccaaaccatcccgtcgatatggactcttgggaatgatcagcctgttatccccggggtaccttttatccgttgagcgatgccgcgcccgtgcgccggcaccggatcactatctccgactttcgtccctgcccgaaccgtcgttctcgcagtcaagcccgcttgtgcgattacactcgaaacccgattgccaaccgggctgagcggacctttgagcgcctccgttactctttgggaggcaaccgccccagttaaactacccgccaggcactgtccctgaacaggatgactgttcgaggtgagacgtcaaacgagaacagagcggtatttcaccttgcggctccacacgggctggcgcccatgcttcgaagcctcccgcctatgctacacaatccgcgcctaacgccaataccaaggtatagtaaaggtcccggggtcttttcgtccttctgcgcttaacgagcatctttactcgtactgcaatttcgccgagctcctggtcgagacagtggggaagtcgttacgccattcgtgcaggtcggaacttacccgacaaggaatttcgctaccttaggatggttatagttaccaccgccgtttaccggggcttgaattcaccgcttcaccccaaaaaggggctgacggatcctcttaaccttccggcaccgggcaggcgtcagtgcatatacagcggcttgcgccttcgcatgcacctgtgtttttggtaaacagtcgctaccccctggtctgtgccacccccaaacgctccgagggcaagcctcttcacgcccgggggtctcccttataccgaaggcacgggagtgatttgccgagttccttgaccaggattcgctcgatcgccttggtattctctacctgaccaccagtgtcggtttggggtacgggcggcgacgcccctcgcgccgaggcttttctcgacggcctggaccaccggatatcgcgccaaaaaagacgcccatcatcacacctcaccctacatgccccacggatttgcctatgggacgggctgcgtgcttgaccacggaaaaccacctccgcggccggctcccattccgtgtcacccctgtgcgctagcctaccaggactacgctcccaacgaccgcggacaccgaaccccgaagggaacgacgccacgcgaccggaggttagtactcatccgttcggctcttacggtacgccgccggtacgggaatatccacccgttcatccattcgactacgcctgtcggcctcgccttaggacccgactcacccggggacgacgaacgtggccccggaacccttggtcatccagcggacgggatcctcacccgtctctcgctactcatgtctgcattctcactcccgcgcggtccacggcacggttccccggccgcttcgccccacgcgggacgctctcctacccaacggccatacgaccgctgccgcgtcttcggtggtgtgcttgagccccgctacattgtcggcgcggaaccactagaccagtgagctgttacgcactctttcaaggatggctgcttctgagccaacctcctggctgtctatgcgactccacatcctttcccacttagcacacgcttcgggaccttagacgacgatctgggctgtctccctctcgacgacggagcttatcccccgccgactcactgccggaatacacatccacggtattcggagtttggctgctattggtaccccatacgggcccgcaagcatccagtagctctacccccgcgatgcaatcaaccgacgctgcacctaaatgcatttcggagagaaccagctatcacggaatttgattggcctttcacccctagccccaggtcatccccccggttttcaacccaggtgggttcggtcctccacgcggtcttacccgcgcttcaacctgcccagggctagatcatcccgcttcgggtccagggcgcgcgactcaaaacgccttttgagactcgccttcgctacggctcccccaccacgggttagcctcgccacgcaccactgactcgcagactcatttttcgataggcacgccgtcaccccaccagggaggctccgacggattgtaggcgcacggtttcaggaactctttcactcccctcccggggtgcttttcacctttccctcacggtactggtacgctatcggtcagacaggtatgcttagacttaccccacggtcggggccgattcacacgggattccacgaggcccgcgctacttgggacacatgatcggaagacggcaagcttccaggtacggggctggcaccctctgcggccaggccttcaagcctgttcccctggcaagccgttttatgactcccgcccggtccgtcggaaccgggacacacgctcccgcaacaccacgaacgcaacccccgaacgggtatcacgcgcccatggtttggtctgatccgctttcgctcgccactactcacggagtatcccttcctgcaggtactgagatgtttcacttccctgcgtacccccggaacaacaaggttccgtgccggcccatgacggccggcgggttgccccattcggaaatcctcggatcgaagccatgttggaggctccccgaggcttatcgcatcctcaaacgtccttcatcggtactgtctgccaaggcatccaccatacgcccttcagggcggcacacgccccgaaaaaccctaatgatagcttcaaacgccagacgacaaatcatcacactgtaaaaaatgatcacaaaacgatcgatctcgaaaccagactccaaaaaagaagcctggcgaaatcgcgataaagcaagcaggacaacaatcctgcattgctcgcgtccactatccagttctcaaaccaccacgcgccccgaccggacccgacccacaggcccacaggcccacggcgtcccgccaggggcatccggaaaaccgcacgcgaccacaagtcgcgggtggcggtccgggaacccaaaagcatatccgcaccactccccgccggccccaaggacccgcgaagccaacgatctcttccacaccagcacgcccgcgccaaaccggagacgatccccggcacgcgggccacacgacggacgccagaccggcgtcctgaaaaactccgtagaaaggaggtgatccagccgcaccttccggtacggctaccttgttacgacttagtcccaatcacgagtctcaccttagacggctccatccacaaagggttaggccaccggcttcgggtgctacccactttcatgacttgacgggcggtgtgtacaaggcccgggaacgcattcaccgcggcgttgctgatccgcgattactagcgactccgccttcatggagtcgggttgcagactccaatccgaactgagaccggttttcagggatccgctccacgtcgccgtgtcgcatcccgttgtaccggccattgtagcatgcgtgaagccctggacgtaaggggcatgatgatctgacgtcatccccaccttcctccgagttgaccccggcggtcccccgtgagttcccaccatgacgtgctggcaacacagggcgagggttgcgctcgttgcgggacttaacccaacatctcacgacacgagctgacgacgaccatgcaccacctgtgaacccgccccgaagggaggccatatctctacggctgtcgggaacatgtcaagcccaggtaaggttcttcgcgttgcatcgaattaatccgcatgctccgccgcttgtgcgggcccccgtcaatttctttgagttttagccttgcggccgtactccccaggcgggatgcttaacgcgttagctccgacacggaacccgtggaacgggccccacatccagcatccaccgtttacggcgtggactaccagggtatctaatcctgttcgctccccacgctttcgctcctcagcgtcagtaacggcccagagacctgccttcgccattggtgttcttcccgatatctacacattccaccgttacaccgggaattccagtctcccctaccgcactccagcccgcccgtacccggcgcagatccaccgttaagcgatggactttcacaccggacgcgacgaaccgcctacgagccctttacgcccaataattccggataacgcttgcaccctacgtattaccgcggctgctggcacgtagttagccggtgcttattcgaaaggtacactcacccgaaggcttgctcccgatcaaaagcggtttacaacccgaaggccgtcatcccgcacgcggcgtcgctgcatcaggcttgcgcccattgtgcaatattccccactgctgcctcccgtaggagtctgggccgtatctcagtcccaatgtggccggtcgccctctcaggccggctacccgtcgtaggctcggtgggccgttaccccgccgactacctgataggacgcgaccccatcccataccgatgaaatctttcccgacaccccatgcgaggagtcggagcatccggcattaccacccgtttccaggagctattccggtgtatggggcaggtcggtcacgcattactcacccgttcgccactctcaccaccaagcaagcttgatggatcccgttcgacttgcatgtgttaagcacgccgccagcgttcatcctgagccagaatcgaaccctccacaaaaaaactttgcagaaagccaacatgtgactctcaaaaataagaaaattgacgatcgccttataaggaaaggcgcatcgcacgaaaaccccaccgtccttcaaggcctcccggccactcgcgaacgagcggacgatgaactggcaatcattgactataaagaagtagtacaaatacgctcttgagttctcaaaccaccaccactcacccgcctcgaggcaccccaaccggggaaccactcgccgagcggcagcgaagagtcaatttacacgaaccccggcgatcacgcaaatcgacccttccaaagataccctagaaccgttgcaaataaacacatccctcggcgtgtcccgattccgtccatctgaatcgtctttctccttttccacagaaaccagctcatccttccggaaaacatgttcgtcgtatgagtcgccttatcaggaattgacggaacgatacgttgaggggattctgttatcctgtggggcgcagcggagcaaaatgacctgccaagacgggatggtccctttcatgagcaggcttttgactcaaaatagaagacggatcgaatattccgcagtgataccgtgaagggagggaacggcatggaggcgcagcctatgaggctacaggacctgagactcaaagaaggaatgtctctagaacagctggccgagctctccggcgtggatcatgatcgtctcgtcatgttcgaaaacaatccggaaaccatacgcaatatgcatttggacaccgctcgccaaattgccaaagcattgcactgcaacgtgttggagctccatcccgacgaaggttggagaggcggaatccactgcgctgaatccgggctaagagacattcgtcggactcgcggctatacgcaaaacgagttgtcagagatgacagggattccccagccgaacatctcttggtttgagacaggctatcgctcgacctcaggcatgcggctggatacagccaggcgtctgtcggaagcgcttcgatgcgatccgacagatttcctaaaagaagcgtatagccgatatgaaaataaatgttgtatctgatttagataaaacacttaaatttcatcggacgccatacttcaacaaacgaatgcatcccgcgcacctcccatctcaccaaaaagattaggcaagaaagaagcccatcaatcattgacttcacaaacctttcccttccagaaagctggataacgtccgagattttgcgcactttcggacgttatctggcgcggaggacgcatttgcgcagttcggaagcgatgagcacgatcatggcaaggccgaggcattcgacccatgcgccgacgctgagcggtaccgtaccgaaagcggtgttgaggaacggaatgtaaatcaccgccagctgcaataccatgctcagcgcgatcgcgccccatagccacttgttggagaacagtccgacgaacgctgactgcaagtgcgagcgcgaggcaagcgcgttcagcatttgcgcgaacacgagaatcgtgaagcccatggtgcgtgcttccgtcatttgtgcgtcgtgaccgatcgcatcgacggaacggtcggtgaacagaccgccgtccaagtgcatgtccatgccgatcagggtgacggccgccataatcacaccgatgaaaatgatgtcgccccacatttcggcgtcaatcacgcgatcggtgagtttgcgcggcttgcgcgccatcacatcgtcggtggacgggtcgacgcccatggcgagcgcgggtgccgcgtcggtgagcaggttgatccacagcagctgcgtggcaagcagcggcacggtcacgccttggctgccaggctgggtgatgccgaggaatccggcgagcatcaccccgccgaacacggtgaacacttcgcccacattggagctcagcaggtagcgcaggaacttgcggatgttgtcgaaaatgccgcgtccttcacgcacggctgcgacgatggtgctgaagttgtcgtcggcgaggatcattttcgcgctctgcttggtcacttcagtgccggtaatgcccatggcgacgccaatatcggcggttttgactgcgggagcgtcgttcacgccgtcaccggtcatggccacgatattgccttgccgttgcaaggattcaacgatcttcaacttgtgttccggcgcgactcgcgcgtagacggacactccgctggtcaccttgtcgaatgccgcttcgtcgggcagttcgtcgagttggctgccggtcatggccgtgccgcccttgtcgataatgcccagatcggtggcgatgcgcgccgcggtcagcgggtgatcgccggtaatcattaccgtacgaatgccggcgcgatgcgcttcggcaaccgaatcacgcacttccgtgcgcggcggatcgatgatgccgatcatgccgacccaaatcaaatcgttctcaagcacatcgctttgttccgcaatatcggcaacatgacctgcggaattcagcatgattcccggcacttgcgcaagagaagcggtaccgagcggacgataagcctgtcccagcgtgcggtatgcatcggaagaaagctgttcgacagtcgcaagaatctgctgacgatcaccttccgtaagtgggcgaacggcaccgccgacagcaatcctgctgcaatatccaagaagtacatcgggggcacccttggagaagacggtcaggcggccagcgtcagcgttgtcttgcgccacgatggacatgcgcttacgttcggaagtaaacgggatttcgccaacgcgctcgtagttggcgtacttgcgatccgccttcacttttcgtgctgcgacgatgagtgagacttcggtcgggtcgccgaccgcctcccacgttacgttttccgcatttccggcagaagcagcagattcgcgcagttcgccgtcgttcgccaacgcgcccacggcaagggtcgcaacggcttccgattcgatgatcccgcgtatttgcgcatgttccatggtctgtggatcgaccaccatgcggccttccggcgcatagccggtgccagtaagctgcacttcgccgctcggagtgaccacgcgctccacggtcatctcattgcgggtgagcgtgccggtcttatcggagcagatcaccgacgcggatccgagcgtttccaccgaatgcagcttcttgacgatcgcattgtgcatggccatgcgctgcacgccgagcgcgagcaccaccgtaagaatcgcagccaaaccttccggcacggccgcgaccgccagcgagacggccaacagtagcgaatcgatcacatcgtgaacgtcttggaagccttcggtaagcgcgagcgcgaccagcaccacgaccgcgatgatgcataccgcgctgccgaggattttggaaacgtagttcatttccttttgcagcggggtttcgtcgtcttccgtggcttgcagcagatcggcgattttaccgacctgcgtgcccatgccggtgctggttacgatggcgcggccggtgccttgcgttacggacgtgccgttgaacaccatgttggcgcggtcgccgagggccttcgcctgtgcgagggtgtcggtctttttgccgacgggcacgctttcgccggtgaggctggcttccgcgattcgtaggctggcggcggcgaagaggcgtccgtccgcggaaacggagtcgccttcgccgagcacgatgatgtcgccgggcaccacgtcaaccgtgttgatgcgttcgatattaccgtcgcgcagcacgttggtttgcggcgcggtcatgctggagagcgcttcgacggcggcttccgccttcgattcctggatgtagccgagcaccgcgttgacgatgaggatcagcacgatgacgatggcgtcgaacggcaatgcttcgccgccttccgcacccggtacggcgttggctcgttcaatgaaccatgcgacgagcgaaatgccggtcgcagccagcaacaggtagacaagggggtctttgaattgttcgaggaatttcttccatttcggcaccggtggtgcggacgcgagttcgttcggtccgtacttgtcgagtcgacgcttggcttccgcttgactcaggccggtattcaaatcgacaccaagcgattgcgctacggtttgcgcatcggcgagcgacggatcgacttgcgtttgcgtcgcggtttttgctgcttgttcgaaatttcccgaactggtatcgcggaattgggtggattgatcttccttgcgatcaaccatgatgatctccttgggagcgccgcggagtagtcagcactcccctgccgttgcgatagtgcgaaaactgcggaaaattgcgattttcgcaaccactcgccgaactgggcaatgctgcgcggttgtgggcaccgggcgtgcgccatcggtgcattcctgccattattacacaccgtgcccattttgcaagactgcaacgcgcccaaatttgtcaagatttcacaaaatcgtgaaacataatctgcaatcttatttcgaccgcgcattcgattacacggcaacaccgacggcaatgtcgctaccatttttggcggaagtgtgatatgttatcgaatgttagtaaataaaattacttacgctatgattcgtagcgtacattggcaacgtcgcaatggataggggtagttactatggcagctcaagaagccacgcaattgcaagaatcacagcaaacgcaaggggttccggaatcgcgcatcctgcaggcgcggcaggcgaacgcaagctggctcaccgatccgaccgtattcgcggtgaatcgcaagcccgcgcactccaatcatcggtatttcctgggcgaagccaccgaaccgaagcagaatctcgacggtgtatggaaagtaaacgtcactcaggcagccaacgtcgacgtggaaaacgcgccgttcgccgcagctgacttcaacgatgccggtttcggcgcgatcaacgtgcccgaacacctgcagatggccggctatttgaagaacaaatatgtgaatgtgcagtatccatgggatggccatgaggatccgcaggagccgaacgttcccgaaaacaatcatgtggcgatctaccgccgttccttcacgcttgaccgtccgctcgccgcgacgctggaaaatggcggcaccgtcagcatcacgttccacggcatggccaccgcgatctacgtgtgggtcaacggcacgttcgtcggctatggcgaggatggtttcaccccgaacgaattcgacatcaccgaagcgttgaacgttgacggcgacaacgtgctcaccgtcgcctgctacgaatacgcgagcgcctcttggctggaagatcaggatttctggcgtttgcacggcctgttccgttccgtggagctcgccgcacagcctcgcgtgcatgtcgaaaccgtgcagatcgaagccgactacaatccctccatggccgccggaacgctgaatgcaaccctgcagttgcacaatgcaagcgacgcggccaccgtcaaggcgaaactgcgtgacgcaaacggcactgtggtgtgggaatccacgcaatgcgccaacgaaaccatcaccctcaattccggcgcgctgaagaacattgcgccatggagcgccgaagagccaaccctgtatgagctgacggtgcttgtcgtcggccacgacggcccgctggtcgaaaaaatcgtgcagcgtatcggcttccgcacattccgtatcgaagacggcatcatgaagctcaacggcaagcgcgtggtcttcaagggcgccgaccgccacgaattcgacgcgaagcgcggccgcgccatcaccaggcaagacatgatcgacgacatcacgttctgcaagaggcacaacatcaacgccatccgcacctcgcactatcccaaccaggaatactggtacgacctgtgcgacgaatacggcatctacctgatcgacgaaaccaatcttgaaacgcacggcagctgggttgcgaacaacatcgaaacccccgaaactgcggtgccgggcagcaaaccgcagtgggaggacgcgtgcgtggaccgtatcaacagcatgatgcgccgcgattacaaccatccgagcgtgctcatctggtcgctcggcaacgagtcgttcgccggcgaagtgttccgcgcgatgcacgcccacgcgcacgcgatcgacccgaaccgccccgtgcattacgaaggttccgtgcatgatcgcgcgttcgacgacgtgaccgatatcgaaagccgcatgtacgcgcacgccgacgaaatcgaggaatacctcaagtccaacccgaagaaaccgtatatttcctgcgaatacatgcacgccatgggcaattccgtcggcaacatggacgaatacacggctttggaacgctatccgcaatatcagggcggatttatttgggatttcatcgaccaggcgattctcgacagcaacggtcgcatgtgctacggcggtgatttcggcgaccgtccgagcgactacgagtttgccggagacggtattgtgttcgccgaccgcacgccgtcgccgaaggcgcaggacgtcaagcagctgtacgcgaacgtgcatatgaccgtcgatgcttccggcattacgatcaccaacgacaatctgtttgtttcgacggctgattccacgtttgtgttgcgtattttggctgatggcaagcccgtttggtcttcttcgcgccgcttcgatgttgctgcaggagcaagtgaacatgttgagatcgattggccagttgacgattaccgtgcaagtgcgcaggagctggttttggaggcgtcccagcagttgacttccgcttgcgattgggctccggctgggtatgagctttcgttcggccagtgcgtggttgcgggtggcaagattgccgatactgttacggccgcttccgccgcttccgatggagcgatcaccttgggccgctggaatatcggcgcacgcagtgcgggccgtgaagccctgttctcccttgcacagggtggcatggtgtcgtacaagcttggcgagcgcgaattcgtgttgcgtaagccgctgatcaccacgttccgtgcgctgaccgacaatgatcgcggcgcgggccatgcgttcgagcgtgcgcagtgggcggttgccggaaagtatgcgcgttgcgttgatacgaaggttgagccgctcggcgaaaccgcagtttccgtcacttacacgtatgagcttgcgattgcgcagcgcacgaaggtcaccattcgttacgttgccgatgtgcttggccacgtcgatctgcatgttgcatatccgggtgaaaaggacggcgatctgccgacgattccggcgttcggcattgaatggatgctgccggtcgagtattcgaatctgcgattctatggcgtaggcccggaggaaacgtatgccgaccgcaagcatgcgaagctgggcatttgggatacgaacgccttccgcgatcgcgcgccgtatctgctgccgcaggaaaccggcaaccatgaggacgtgcgttgggctgagattacggacgattctggtcatggcttgcgcgtgagccagactgcgaatactgaaaccggcgttacgaagccgtttgcgatgagcctgctgccgtattcgagcacgatgcttgaggaggcgctgcatcaggacgagctgccggagccgaagcacatgttcctgcgcgtgctcgccgctcagatgggtgtcggcggcgacgattcctggatgagcccggtgcacgagcagtatcagctgcccgccgaccagccgctcaacctcgacgtagccctcgacctgttctagtttcaaggattcagtcgattcctacgtgcgaaatgcctcccgattcttgatttcaaggatcgggaggcattcgttgtgccgcaagttgactttcggcctcacgattcgcagttctgtctcacgatttcgcaagatcgtgcgacaattcggaaaaaacatgcgatcagaccatcaaaatggacgatgagggggattttgttgatggcttaaattagacggattgcctagaatgagggcagaacttccgaaacgttcgagcgcaggcgggcaaattcgcgcgcgtccgagcgtcacgaagcacgctcttccaggaaaggggccatcatgagcgacgcaatgaacaacccgtatgcgaacaatccgaatcaaaatggcagcaacgaacagcagccgcaaggccagccggaatacggggcatacgcaccaaaccagcaatcgcaatcccagcagcagggcggcaatcccaacaattcgggcaatccgtatcaaagcgagcctcagaccccatgctacttcgacggtcccaacgccaacccgaatcccaaccagaacggcttcttctacgcgagctacaccaccggtcagccgtacggccaaccatacggacagcagaacagccaatccgacgctgacaacggcaccaacaattggcagccgatcagcccgttcaagctcatggaggaatggctcccgaagaaggcaaagaacgcgatccgcggcacgtatgcggtactcggcatcgccgccgtcattctcggcctggcactgctgatttggcccggtgccacactgaaggtcgccgcaatcgcgcttggcgcatacttcgtggtttccggtgtggtccgcattgtgaccgcaattgtggaactcgggcttccgggaggatggcgcgtgcttgacattctgatcggcctgatgctgtctgtcggcggtgtggtcatgctgaaaaacgcggcgctttccggagccacactcgccgtgctcatcaccatggtggtcggtctcggctggatgctggaaggcgtgatggcgctcgtggaatcgtggcgcatgccaagctccgcatgggccgtaatctacgcactgctgtcgatcgtcgccggcttcatcgtgctgttctcccccgtcagctccacgacctggctgatcctgttcggcggatgcgcgcttgtggcgatcggcatcgtcgcgatcgtacgtgcgttcaccttcggcaagtccaagcgcaagtaattttttgcggcgcgggccgtaaagtctgattatctctgttttcccaggggcaccaagcaacagctcggtgccctttccatagcgaaatcgctttttataccaagattcaaagtcgcacaaccatgaatcttggtattaatactggtatataattgggtatgaaattcggttttaagaaaggtttatcatggcaagcgcacttgacatactcgatgaccttgctccaatcagcgagctcagcaatggtcgtacttccgcattgttgcagcgggccgaccacaatccagtcattctgatcaaacgaaacaagccgtcctacgttctcatgaatatcgaaaactatcgcgctctcatggaacgaatcgaagacaacgaagacttgcttcttgccgaaaaaagactcgacaacagtactggcacaactatcagcaacgaagaggtcatgctcgatctcggcatttccccaagcgacctcgccgaggcacctgagccggaactcgcatgaactggcaagttgaatggcttgacgaagccaagaaagacatgcgcaaactcggcaaagccgagcaaatccaagtactcaagggaatcgagaaagttcgcacaaacccactgcccacctcgcaaggcgggtatggcaaaccgttacgcaatgccgaacgaacgaaactttccaggctttgcaaaatcaaattcagggatatcggcattcgcgttgtttacaaaccgttactgcgaaatggaatcatgaccatcatcgtcgttggcattcgttccgatagtgacgcttacatcaaagccaacaagagacgcaaagaatatggacgataagatgcgtccgccaattttcagcgaacgttactttttcttcaagattagccgatgattttacaaaagaagtgacgatcgtcgcatgacattgtcgatttgcccgacgtaagatgaaggcacaacagaagaacgaagaaaagaaaatagacaacaaacacagacttacggcagcggccagaggaatggacaagaaaacagatacgcgccgccaagccgaacgaaaggaaacatcatgaagaacaacactttcaaccaggtcatcaacgccaacctcgcttccatcgatccgggcttcggccagttcgcactcgccaaggcttcctccgacctcttcaagaaggtcctcaacaagtaagaccgcttcctagacgggaggcaaggcgcaggcgccacagcacctcgcccctcttctttccaatccttaaatcacatagcgggaggccgcggttccaaacggaatcgcggcctcccgcttttcacgtacgccggctacccctcctcaacagcgagattgcgggcggcggcgcgttcgcgtgggccgcgcgtcacgtagaagccgattgccacgatgacgaacatcaccgtgcagcagatccacagcacacggctgccgaacgcgttgagaatccagcctccgaccaacggcgagaacgcgttcgacagcgaccacaccaggttgtataacccttggtaggtgccgcgcacatcctttggcgcgatgttcgccaccgttgtggcggcaatcgggaacgtgcccagctcgccaagcgtccacagcacggtcgcgattgcgaacgccacccacgaattcgcgccgatctggaacgcgtatccgaccgccgtgatggacatgccgagcaccagcactcgggtgttgctcatccgctggaacagaccgatcgcgggaatctgcagcagacacagcaggccgccgttgatggtcagcagactggaatattcatccgtgccaaggccgatctgcgtcatggaaatcggcaggccgctgacgatctggtaatacgccagcgtgtacaggaacatcagcaccaccatcgacatcagcgcgccgtcggcgcatgcgcgacgatagctgcgccatacggagaaccgctgcggccgctgcgattcgccggtttgtttcacagcatgttccacggcatttcccgcagctgattccgcggcttgcgacgcccgcgccggcgcgacctcgccccgcgggcgcttgcccagcccgacttccttgaagaacacgatcatcaagatcgtggcgaacaccagcaccgcggcttccgcgtagaacatcagcgcataggagatcttcaccaactggttggcgatgatcgggccgatcgcgaagccgaaattcgcggcccacgtctgcagcgaatacgcgcgcttctgtttgcggaacggcaccacgtcggacacgtacgccgcgaccgcgggcgtcggcatggatgagatggcgccgtaggccagcagcgcgatcgccatgatccacggattgccgatgaacgccagcaggaccagcatcgcggcggagccgagattgccgatgacgatcatcgccgggcggccgaagcggtcggacagcgcgccgccatacaggcagccgaagatgccgccgaaaccgtacatggagacgatggtgccggccacgcccgcgctgacatgcatgtcagacaccagatacatggaaaggaatgacgtgacgaagcggcccatccacaggataagcagcgtgacccacaagccccagaacatgaggggcaatccgaaaatctctttgttcttctccattcttgccatcatatcgagcaatatcgagcggacgcgacgccagtagccttttcccggggtgctgggagaatggacaactatggcaatgaaaaaaggaccgaccaaggggtcgggtggaaagcatcgtaacgcgctgaggggcaagggaccgacccccaaggccgaagatcgcgtatatcacaaggcttacaaggaaaagcaggctaccaatcgtcgtaagatggctgatccgcgactggcggcacgccgtcgcgcggcaaagttcagctcagaatccgacgatctcgtcatcggtcgcaacgccgttctcgaagcgttgcgctgcggcgtgcccgcgagcacgctgtatgtggccgcacgcatcgagcacgacgatcgcacgcgtgaaatcattcgtctcgccggcattcacggactgaacctcatggaagccgaccgactggaaatggaccgtatcgcacgctcctccaaccatcagggcgtggtgatgaaggcgcagccgttccagtattcctcgctcgccgagctggtggaacgcgcggacaagaagtctcgtgccatggaagcggccaactccgcaagcgcacgcattgcggcacgtccgctgttcatcgcgcttgacggcgtcaccgatccgcagaatctgggcgcggtcatccgttccgcagccgcattcggcgccaacggcgtgatcctgccggaacgtcgttccgcttcggtcaccgcagccgcatggaaggtgtccgcaggcgcagccgcgcacatgccggtcgcccgcgtggtgaacctcaccaaagccattgaaagcctgaaggaacgcggatactacagcgttggtctcgacggtggcggcgacgccctcgttggcgaaaccggtttcgaaaccgatccgctggttgtggtgctcggttccgaaggcaacggcctgagccgtctcgtacgcgagacatgcgattccatcgccggcatcccaatgtcgaacatggtcgaatcgctgaacgcttccgtcgcagcgggcatcacgctgtattccgtcgcacgcgcccgccgcgaggccggtgccgccgctgacgcgaagtaatcaacacgaagcaacaggaagtaagcacaacaaggcagcaagtccgaaatacatatgagcggatagtccatacggattatccgctcattttgttgcgcaaatctgtacttggattgattttgcgcttaccgcagacccactcccccgccaacgatctcccgcaacacgttctctcactttcaaaagtcaaaatttttttgagttttgaaagtgaggggtgtgaagggataacaaaaagaggaggattattagtggtcctccgcttaacggctcggccctgcaatttttgactgcggctacgccgcagactcaatactgccttcggcgcggctatcgcctcgtctcagggcacattgatagaaaaagctccactggagctttttctatcaatgtgcccatacagctgcgtcgggatcgtcgtcggggttgtagccgtcgtcgggatcgtcgtaggtgtattcgtcgtcgatcacaccggaatcggcttcggcgttcaacgcgtccacatccttcgtggtgagcttgtactgcggaagcaccttctccacatagctttgcaccgcctcggccatcggcacatcatgacccgccttctcggccaggaaccaacggtggtcaagcacttcatggaagaactgagccggttcgatctgcgaacggtattcacgcggaatcatgcgcacggtcggttcgaacacttcacgcatccaatcagtggcgacaatctcaagatcctcaccctcacgccacgtcgaagcgcggtaggcatccaaatcgttcaacagtcgacgagcctgattctcctgcacatcaagaccagtcaatcgcagcagcttacgattcgcatagccggcatcgaccacacgcggacgcaccagcacacgcttgccatcttcggcggtcttcatttccagttcatccacatcaaaaccaagctcattgagcttgttgacgcgcttctcgatcttccacatctcatccggaccgaacttgtcggtatcagtcaacgcgctccacagcgaatggtaacgatccaccaaacggttgccgatcgcaatttcgtcaacaccgctcggcagcagcgaaccggacgaaagatccatcaattcgccaataatgttcgtacgggccaaatcaacgtcgtactcgcgctggccttccgtcagattaatctgcagatcaccggtttccgcatcaaccaaaaatgcggagaacgcgtaggcgtcgcgcaggaacaacacgttcgacagtgacacatcgccccaatagaagccagccaaatgcaaacgcaccatcagcacggccaacgcgtcgatcagtcgttccgcggtatcagggcgcagattacgcgcgaacagcgcacgatacggcagtgagaacttcaaatgcttggtgacaaggatcgcttccagcggctcgccttcacggctatgacggcctgtgaccacggcgatcggctgcacggtcggcagttccagcttctgcaggcgacgcagcagctcgtattctcgttccgccacattgcgcgtgatttccttcatggcgtacacttcgtcgcctacgtgcacgaaacgcaccacatgcctggaaataccacgcggaagattagccagcaggtcttccggccaagtagccagcggcttttcccacggcagggtgaacatctttggattcgagcttgcggcggtgattttcagcgcatgcggctccggagatgaggcagccggatcttcggccttcacggaagttgctttcagcacacggggatccatctgtggcaattcaagagattccatgaatcaacaatttacctgttgacctacccgaagaagcaagtatggacgaatccgtttcacctgccgatatgcgatgatctcaatactggaatctcactatccctctcatattacgatcgaatattgcgatcgatgctacaaacagacattacaagccgatatcgtgcttgcggaaaacaaaagaagccccgcaccgacgcggggcttctccaacgagacgataagagaggaagagcacgtctcgtttaatggttgacggaagttcgagcttccgccaagtttttattcagccacccgccagccgatttccgtaaaggatattcccttgaagaaacagccaacggttggttactcggtatcagctcagttcagacgcagctcggtcgacggagcgaacaggtgcatcttggacgggtcgatcttgatcttgacggtatcgccgaccttcgggagagcacgcgggttcacgcggatcgtggtgagcttgttctgatcggacatcatggtggatgcctcggcagcggagccatcggtgatgatgttgccgtagatgtagccatcggagcccagatcctcaacgttcatgaccttgagggagaaggcgttggcgtcatccggggcggccagggaagcgtcttccggacggaagccgacgacgatctggttgttgtcttcagcggtgagcttgttgacggcctcggccggcagatccacggtgtcttcgccgatctttgccttgccgttgaccaccgggtgggtgttgatgttcatcgacggggagccgatgaagccagcgacgaagacgttggccgggcgatcgtacagctcggtcggagcgccgacctgctgcaggacaccgagcttgatgacggcgatgcggtcacccatggtcagagcttcggtctgatcgtgggtcacgtacagggtggtgacacccagctggcgctgcagagcagcgatctgggtacgggtctgcacgcggagcttggcatcaaggttggacagaggctcatccatgaggaagaccttcggctcacggacgattgcacggcccatggccacgcgctgacgctggccaccggacagagccttcggcttacgatcgaggtactcggtcaggtcgaggatctcagcggccttctcgacgcgcttgcggatctcttccttcggggtgccggcgatcttcagagcgaagcccatgttgtcggccacggtcatgtgcgggtacagagcgtagttctggaacaccattgcgatgtcgcggtccttcggctgcatcgtggtgacgtccttgccaccgatgaggatgcggcccttgttgacctcttcaaggccagcgagcatacgcagagtagtggacttgccgcagccagacgggccaaccagcaccaggaactcgccgtccttgatgtccatattcaaatcatccaccgacggcttatcgttgcccgggtagatacgagtaacatggtcgaatacgacttctgccatgatttgtcatcctttcagaggcaggtacgtgcctcacgatccgttgtaaagggatttcttttcggtgcctcgccttgcggcttacgacttcgacaaagccacaattcaaagcgttaatttatttctttggtttggcgaaggttctcttcgttgagccacgttccatgatacatacaacgctaaaactgtcaatgcgtgtcgcgagtcgcgctgtttacctactctggcaaagggggttaacggcgtagtaaatacacgcctttatcgccatcatgcaagacaatggtgcggagcgaaagacagaacagggaggttgcagtgcgcaatattagaatcggcgtggtcgaggatgatcccgcaagctgccagctggtacttgactatctcaaccgatatcagcaggaaaatgacgaacaattcaccgtttccgtattcgacgacggcgcgagaatcgtagagaaatatacccctgtttacgatattttactgctcgacatcgaaatgagcgaaatggacggcatggccgccgcgagacgcattcgcgagcgcgacgacaaggtcgtgatcgtgttcatcaccgccgcaccgcagtatgcgatcagcgggtacgaggtgcgcgcattgtcgtatctgctcaaacccctgccgtggttcgcgttttcacaggaactcaagaagtcgatcgacatggtgaggcgcaatggcgacgattccatgcttatcgaaaccagcaacgggcagatgcggctgaatcttgccgatattctgtatctcgaatcgatccggcataccatcgtcatccacacgttggaaggcaaactgtcgatcaatggcacgctcaaagatatggaagcgaaactcgccgaccaccatttcttccgctcgaattcctgctatctggtgaatctcaagcatgtgacgggcgtcgccgaccaggattgcgtgatgtcgaacggcgaacagttgcgcgtaagccgaccacgcaagaaggcgttcctcgccgcgttgaccgactatataggaggtggcaggtgaccagcgtgatattgccgaatgcgctggccggattggcaggaggactggcaggaggctccccttccataccttccgttttggtgaccgtgctttcggtgccgccgatgacgccaatcaccaacgctctgcccgacatcccccgttcttatacggcgatctgcgaatgggccgcgtgcatggtgtatatcgcggtgtcgtatcgtcgcgtgccgctccgacggtcgatcatcgtcagtgcggccggattggcatcgctggtcgcggtgcagtatttcgacggcagtatgccgatctggttctggatcatcggtatgctgctcgcattcgcctgcatgtatgcgacgattctgctcggcgcgggcaccggcaaacgcgagggcctgtatattacggcgcgcgcgttcgtgttggccgaattggtggcgtcgctgcattggcagatcgttacgttcattggcgtgcgcgacggattcgccgattacgattggcgcgcgatcgcgctgcttgtcgttacgtatgcgctgtgcttcggtctagcttggatggttgaacgcggcaatttcagccaggccacacctaccttgccgaccgcttccgccgcgattgcgacgatggccattatgatcgtcacgttcgccatgagcaatttgagtttcgtgtcgacgaatacgccgttttccggttcggtcggccaggaaatcttctacattcgcacgctggtcgatttctgcggtttcgcgatcctatatgcgcagcaggagcaggcgcgccgtattgaggcgaatacggaactcacgtcgatcaacgcgcagctggaaagccagcatcaggaatacctgcaatcgaaggaaaatatcgaatcgctaggccgtcttgcgcacgatctgaagcatcagcttgcggcgttgcgtgccgaagtcgatccgaagcatgccgcggccggcttcgagcagctggagcaatcggtgcagcgctatagcgcgcagcagcataccggcaatcccgtgcttgacgttattttgaccacgaaagagcgcacgtgcgccgatcgaggcattacgttcacggcggtcgcggacggctcgctgctaagcggcatgtcgtcgatggatatcgcatcattgttcggcaacgcgcttgacaatgcgatcgaagcgacgtcgaaattgccgaaacgtgagcagcgtctgatcaaacttgcgttatacgagcagaatcgctttattgttatccgggttgagaattattacgattcccgattgaagaaggatgcggaaggcaatctgcgcaccaccaagcgcgacgatcagcatcggcatggtttcggcgtgaagtcgattcgtcatatcgcgcagcagtatggcggcgaagtgacgattcgcaccgaagaccactggttcgtactgaccgcgctcattccgaagaaaaccggtcttatggccatatgaaaaaccgcgcctgagtcatgcgggacctgcgaggccacgcgcgactcaggcgctcaacaccggccacctgtacgccaaccccctagtctaccgtctaatgcacccttacatgcgcattcttcttaattagcctcttttttcgcacttttcgatagatgaacagcagcaagcggtccgcccaaacggcttgcgacgaacgcactcaccgcaaccgcgaagccaatgggaacaaacagattaatcggagcatccgcaagttccatcaccaagcaaatcgccataagcggagcctgttgggaagctgcgagcaatgcgcacgcacccagcagagcatacatgccaatcgaattcgtgtgaaacacctgcatccacagaacacccagcacagcaccccccgaagcgccgagcgcaatacccggctgcagcacaccgccggaagcgccggaacggatcgtcagcaatgtgacaatcgccttcgccaggaacgaaaccagcaaaatcggcaccaccgccaaatcggccttggacgagaaactcaactgcgcggtggcacggccattgcccataacctgcggcacccaaatcgccaccacgccagtcagcaggccggcgagcggcaacatccacagaatgcccgcgcccgacggtttggacttctcggcccactgcgagccgcgacggaacagtgcgccggcagcgccgagaatcatgccggcaaccagtgcgaacgccatgtaatcgggggtaaacaaaccgtcggtttcaccaatcaaatagaacgtgtgtgtgcccttgaccagcgacgccacccacgaagccagcgcggaacaggcgaaagcgagcgtcaccgtttcgagggttatgtcggcgagcagaatctcgaccgcgaaaaacgtgcccgcaagtggcgcgttatacacgcccgcaaggccggcggcggccgtaatggccaccaacatacgggtgtctttcgcatcgagacgcgcccaacgcgcgaaccgctgaccgaacatcgcgcccaactcgcgcggcgccacttctcgaccgatcgacatgcccgtgccgacaatgaaaatctgcaacagcacatgcacgacggtctgccaaatcggcataatatcgccatttaccgcctttttaacggacggcaccttcgtactgcgcgtacgcaacagccaccaaatcacggcggcgacggtcgcgccaacggtcacggaaatcaagcaccgaatcgcaggaacgttgaacgggccggattcctgcgaattctcaacatagccgagcgcaagatgctcgacgccgtacagcataagcgtcagcaggccagcggccgcgccaatggccactcccacaatcgccaccgccgcaatcagcgccggaatacggccgataatcggctgcgatttcgcctcgtcctgcgattgatccgacaccattgcctctcccacgttgcgtgcacctcgtcttcagtccatctcgtcgttcgtattgtttccatccctgccgccgctgcgacgccggcaacggagctatcgtccgatatcccgtttgcgaatcttcgcatgtacaccacgctgaacgtcgacagcttcggaaatatcgaaatcgacagcggcgctgagataagcgtacgcgtgtttctcatcgaaacccgcacatgcgcccaacaaacgaatcgcttcctgcgtgcagtcggccaacgcgtcatccagacgcaacgcccggccggtcggcaccagataatcgtctgtctccaccaacggaccatgcaatggaccgaaattacgcatgaaacggtcgcgtgccaccacccgcacgcgaagcgtcgcatccaacgacgcttcgaaggcggtcaaagccacttcgccgttgccttgggcgaaatggggatcgccgacgtacaggccggcaccttcagtgaataccggcagatacaggcgtgtgccttcaaccagaagattgatgtcgatattgcctccgaaatcccccggcggcacggtgctcagatgctcaccggagtccggggtaacgccgatgattccaagaaacggagccaacgggaacacgatatcgccgtcggcgggatccggcagccgcaaggttcttccggaacgaaacgtttcaatagcgtccggcccgctacgccgcatcacgccttgcaaccgcccttggtattccattgcacgggcgaaaatgctaacggcccttcccccacgcggcaaccctcccatcaaaacgccttttccatcacgattggagatgactccatacggcacgcggggcttcagggacagaacatcgatcgccagccaatcacccggatggacgtctttcacggcaatggaccgtgtgatgacatgcggcccagccccctgcggatgctcgacccgtccagcgatatcaatcgcatcggcgagcacatcctcgtcacgcactccctgcgcatggaagaaagccaacggatcacggccttgatcctccaaaagaccctcatggctcaccgtgtcgatacgcaggatatcatccgattccacagtcgccaccggccggtcccccggcaacggcaacgtgccccaacgcacggtatctggcgtgcttgcgatatgcatgatcgccatcattcactccttcaaaatgacccttttacagtggaagacatcaggccacttacctgtccaccactcccccgacctcgcggagatgctgttccatggcgaattgcgcgccttcggaatctcccttccggatgcaatcgaaaatccgacgatgaccttcaatcgacaattctctcagacccatggtttcatgggtcttcaatcgagctgactgagtggaatcgttgacgaattccagcaaagccgccactaaaggattcccggtactttttgccaccgcgagatggaaattcatatcaaaatgcaacgactccttcggctgcatccgaggattcgaacgctcgattatcgcatttaacgtgatgagatccgactctgtggctttggacgccgcaagcgcggccacatgcggctcaaccagatcgcgaagctcgatgatgttgctccattcgtgcgaaacatccgcaagcctggcctcaatagccatggctccttcgtccggtccgagaacaacagtaccggcaccccatttggtcgacacgattttgcgcgcagccaacaaggctatggcgtcacgaatcgtgttcctcgatacatggaaactcgccgcaagctcgcgctcgctaggcagtttggatccggctggatagtcgccggccgcgatgcgctgttccagcagcgctgcgatctccgatgcttttccagtaccagtcttcagaaacacatccccgacatcattgcttttcatatcgcctcactttccacgccgcccacttttccacattgggcggaacccatagaaagtataacccgattggtccaacctttagaccactttggcgaggaattccctagtcctgggatgcttgggagcatccagcacatcttcgggcgtgccttgttcgatgatctgcccgtcagccataatgacaatcctgtcagcaacttttctcgcgaactcgatctcatgggttacgatgatcatcgtcgtcccgctttccgaagcgagatgttgcatcacattaagcacttcgatggtcatctctggatcgagggcactggttggctcatcaaacagcatcaacgcaggatgcatagccagggcccgggcgatcgccacacgctgctgctgaccacctgacaattcacgtggatgcaggtctattttctcactcaattcgacctgttggagcagtttcttcgcctcctcgacgcattgcgccttcggccgcttcataatccgcactggtgtgtgccagacgttctccaaggccgtcatatgagggaacagattgaaatgctgaaagacaaatccgatgttccgacgctgctcggcgagatgatggttgtcgcgcatgtacgcgccagctttcgtcttcttatatcccatacggtgtccatccacgaacatctctccggattcaaaggagttcagcagattgatggtacgcagaaaagatgtcttaccggcgccagaaggtccgagcaggaccaccacctcgccgcgtcggacgtccatcgatacgttcctgaggattttattgtcgccgcgcgtcatacagatgtcgcgagcgctcacgatgacgtcttcggcgggcaatttgttttgcgcgatcatgattgatgccccatttcttatctatgcatgcgcttccggcgcaacggattgcttcgtcttggtattgcccgcggcaacggcgcgaatagccgaagcagctttcgacagcatgcttttcacagggataccgagctgcctgctcagatgacattcgatttcgttttgcagaatcgtccacaccgttgtcagcagcagatagtagacgcctgtgaccaggaagatttcaaaagtcttgaaagtcgcggagctgatggactgcgtcaccaggaacatctcgctcacgccaatgatgctcaggagggacgtgtttttcatcagcgtattaaactggttacccagcggggggatcatcgtccttaccgcctgcggaagaatgatccaccgcatcgaggaaaaaccggtcatccccaacgccatggaggcttccgtctgcccttccggaacggcggaaatggccgatcgaatgatctccgaaacatacgccccgcaattcagcgtaagccccacgatggcggccttcacggaaccggccaacaccacacccatcacggaagtgtcttggaatttgtagatattcgcagcggcgagtccaagatagatgaccaccaatacgaccagcagcggaatgccttgcaagatccacacgtacaccgaagcaatgatacgcaacgcgcggttacgggaaagcctcatcaacgccactatcaaacccaagaccaagccgagcaccatggataccacggaaatggccaccgtcattcccaaaccggcgaggaatgcccccgacggatggaacaggctctgccagaaaaacgtccaatcgaaatgcatctccattcaccgcccatcacttgaagtcgtaggcgaggctcgacatatcccatttgtcgagaattttcttgtaatcgcccgttttgttcatcttttcgaacgactgcttgagcgcatcaccaagttcagtattacccttcgtgaccgcggcgcctaccttaatgacgccaaattcatcaccaaccggttcgaaagcgccctgctgcttactctggtagtacaggacgaccggcgtctcgccaacatatgcgtccacctgtccgttgaccagttgctggacagcggcagtcgtctggtcggtctgcacgacggtcaggtccggcttgccatcggccttgcactgcttggcctgcttttccgcctgaagcgttgcggtcttaccgaccgcagcgctgactttgagaccgcaaagactgtcgtccataccagtcaccttcttgggattgtctttcttgactgcgaccttggaaccggacatcaggtatggaatcatgtcgacgaccttttcacgctccggcttgatgtaaagggaggacatgatggtgtcgcatttacccgcctgcaacgcggggatgatggacgcaaaggccacatcctggaatttgacctgaagcccgagatcactggcgatccatttggccatctcaacctcggccccaacagggttattcgtggaatccgtgtaatacgtgggaggatttcctgtactgaatgcggcgcatacggtcaacgtcccattgttctgtattgccggagacgaaaccttggcttccgaagcggaagcagcgccatccgatgcggaggaggagccgcaagcagagacgagcggcatcacaatagccaccgagagcagaatcccggccagcatcttagatttgacattcatgattgttcctctctaactggttcattgattgaaccattatcaaaatagaattcgctgattaacggcaatagtcagcaatgtttcaaccagttttcgagaatgtggttctataactgaaccagttaatcaattggtctagctacagagactatgcttattcccggcgaaatcagcttggttttgcaaggaatgctccctcggattcaaaccgtcgtcatcttccttttcactgggctggtctcaagcacagtaaccacggtgacactggggaaagtattgaaaatcgtggcatccaaggtacaacatgcacaaaatagacgatttcaaatcgccatttttgcacaaaatagatattttttcacagccaaaagcagggaaccagacctccatcacaccagagagaacatgaatccgtaatgtgtaacgcaacagaatgacgtatgtggcttgcatgccaaaaacgcaaccatgcgcacctgagaaggaatccacccgtaacacaaccgccgcagtccggaaatattggcgtcatcttcttgttttgccattttcataaccgtgatatcgatggaatcgcaatattcgttcggctcattcgaagcatcaacgcaatacggaaaagagaagccatggccagcatcagcacaaccgcgcaagcgatcccgcaaacgtcatcatgtctttcaatgcctatttccagcactgtcaaagccgtaccccgctccggcatccgtgacgtgttcgaccgcgcactcgctgccgacgacgtgatctcgctctgcgtcggcgaaccaggccacaccgcagcgccgtatatcgtggaagccgccgtgcaagccgcgcgcgatggcaagaccaagtacagcaatatcaacggcattcccgcgttccgcgaggccgcggcggattacacgcgacgcgtgaagcaccttgattatgatccgcgcaccgagatccaggccgtcgacggcggcaccatcggtctgttcctggccatcagcaccgtcgtggcacccggcgatgaagtgattgtcccctcaccgtatttcacgtcctacacggcttccgtcatcatgtgcggtggcaagcctgttcctgtggcgttgaagccggaacatggcatgcatctgaatgcggcggacatcgaggcggccgtcaccgaccgcacgcgcgccatcatcatcaactcccctggcaatccgagtggggccgtcaccaccgccgatgagctggcacacatcgcacgaatctgcgtcgaacataatatttgggcgatttccgacgaggtctaccattcgatcgtttacaatgcggcaccaggcgaagcggcgccgtccatcgctgcagcccccggtatgaaggaacggacgattatcgtggacagtctgtccaaaacgtatgccatgaccggctggcgcatcggatatctgcttgcaccggcgcaagtgatcgagcagaccggcaaaagcgcggaaaacctgcactcctcggtcaattcgctgtcgcaatatgcgggcatcgccgccatgctcggctcacaggaaatggtggagcagatacggcaggaatatatagccaagcggcagatcgtggtcaacgcacttgccggcagtcccgttctgcggctggtggagccggaaggcgcgttctacgcgttcgtggacgtgcgcggcaccggtttggattccgatgatttctcccgcaggctgcttgacgaacaacgcgtcgctgtggtgcctggcgaggcattcggcgaggaaggacgggggtttgtgcgattgtcgtacgccggcgatgcggatgagctgcgcgaaggcctgcgccggctgcgcacattcgcggaacagatatgaaaagcccgtccagggaaaagggaagacctggacgggcacaaggaaaggaagagaggaatcagtacagacttacttggcggtctccttcttgtcgccgctcttcggcataacccagaacttgagcagcgggtaactcacgatcacggcgagcagggtgttgaccacggaagcgatggtgccagcaatgccagcgcccatgccccaaccctggcacagaccggtcacatagcccggcagcacaaggttcacaaccacgatgatcacagcgaggatcacgtacttccaagcggcatccttgaagctggagtcagacttgaacacccacttcatctgcacgaagaagttcaccacctgggcgagcgcctcggcaagcaggaaggtgaggaagccgcccagaccgttgccctgagtgtcgtagttgaagatcaggaagtggaacggctgcgtcaggcccatgccactgatgaagatggcggtgccgatccacgtcaccacgaaacgggtgatggtggagatgttcgacagcacgttgaacaggatgaattcccagatgttcgggtggtccttgatccactggcggatcggaccgaccttctcagccggctgcgttgcgttgttatcagtcattgttcagctcctttgcagtgcgcttgtttgcggattggttgcggaagaagccggcgatgacgccgcccaatccgcggaaggtgtgtccgttggcgattttgacgatggcgtcgaccatcgcggaatcgaccatgccttgggtcatcttgctcatggctcgcggaggcatgttcaggatgaacagggtgttgaggtccggagcgccggtcttctgacgaatcttggcctcctgcttggtgagcgtcttggcgacggtacgcgccacgaagcccttggaatccacccacgacatgatcggatcgttcacgccgaacgtcaccggcttgcccggtgccacaacctcatggccgaacagcacggccatttcggcgtcggtcacttccttgacgtggccgctgagataatggccgagcgcagtatccgcggcaaccggattgacatcgcctgcgacggtgtgcggaatcgtaagcggcaggtgttcggcgttgtcgcccaccatcagcgtccactcgccggtttccgtcttccattcgttgctggcagcgtcgaagtgacggaaggtgtaacggtcgaaatcgatgtgcacgctcttgctttcgtgtgcggcaagcgaaaccttggcgaagcccttgagctcgcgatccggacgcaacacaccaccctgcggaccgcgcacgtacagctgtacaacggtcgaaccggcaacatcggaatcgttgctgaccatcacgtcaatgccgttctcaccagcagtggcggcactgtaggtgaacgtggagtagctcaagccgtaaccgaacgggaagcgcacgggcacaccggcggtctcgtaataacggtagccaacgaacgggccttcgcgatagatcgcatcgcgaccaatcgccggataccaaccggagctcgggcaatcctcgtaatgcatcggccaggtttcggccaagtggccggacggattgatctcaccggtcagcgcgcgcacggtcgcggaagcgccggcctgacccgacagacccacgtaaagcactgcggcaacgtcgtcaatccacggcagttccaccggagagccggcgacaagcacgaccacgatcggcttgcccgcgcccttcagcgcttcgaccagatcgttctgcacctgcggaatcgccatggtggaacggtcaaggccttcggattcgctgcgttcatcaagaccgacgactgcaagcaccgcatcaacgctttccttgccagccagcgcgactgcgtcttccacgagcacgcggtcagccttgccctggcggtcatagccctgctcatagccggcaagcacgaggccttcgtcgttcttgacctcttcaagaatgttctcttccttggtggcgttcaccttggaggagccggaaccctgataacgtgcggttgcggccatatcgccgatcaccgccacgcgggtgccggccttgaatggcagggtcgcgttatcgttcttcaacagcacactggagccttcggccaccttgcgtgccacgtcgtgatgcgctgctgcgatatcgtctttgagcagatcgttacgtccaacaccgaccagcttggtcgctgccgcgatttttgcgacttctgcggcacgcgcgttgatatcggcttcagacagggttcccgccttgaccgcgccttccagctcacgcacggaagtgaagcccggagacggcatttccagcgatccgcctgccttgactgctgcgaccgcggagttggatccgccccagtcggagacgaccatgccgtcgaagccccattcgtcgcgcagaatctcctggagcaaatgtttgttttcgtgcgcgtagacgccgttgatctcgttataggaggtcatgatggtcagcggcttggcttcacgcactgcgatttcgaaaccggtcagatacagttcgcgcatggtgcgctcgtcgaccacggagttgctggcctggcggcgcagttcctggctgttgaccgcgaaatgcttcgggcatgcggagatgccgttgctctggatgccgcggatcaggcctgccgccatacgtccggcgacgatcggatcttcggaatagtattcgaagttacgtccgcacagcgggttgcgcttgatgttcagacccgggccgagcagcacgttcacgtcaagatcgtgcgcttcgctgccgagggcctcgcccatttcttcggcgagcgccggatcccaagaattggccacggttcctgcggtcgggaagcaggtggccggcttggatgcgccgatgccgagatgatcgccttcgccgagctggcggcgcacgccgtgggggccgtcgctcatcacgaagctggggatgtctgcgcggtcgttgcctcgcgaatcccattcggatccaccggaaagcattgcggccttttcaacgaccgaaagttcttcgagttccattggttctcccttgcactaactcctcgaacccgcttggccctccctgagcctgcgctgttcttgttgcggatgttcttggctgcatcgcatgtgagcatccgccgctagtttgattgaaccagcctttcgccgccaatctgcgccccattacacaacctgtcgttttgcccgcacaatcggacattccttaactgatttcggaatcaaaggaattcacatggcagatacgtttttaccgctccgccgcgctttcgtatgcgttccatacacaccatacggcgtaggaaatgagcggacagatggtggcggaaataatcacgtcggtcggataatgcaagccgagcagcaatcgcgaacaggcaaccgccgcgacaagcgcgacagcgccgatgaccgccctgcggaggaacacccgtcttccgtttgcacgcccgtcatcttctccgtcggggaagcatttgcgcgcgaaattacgcacggtaagaatcatcatgaccgatacgatcaccgcggctgccgtgtgaccactcggaaaacttggatcgcctggcaatagatcactaccgacggacgtgatcggacgggggcgttcgaccagccatttgacaccggtcacgtacagtatcggcgccgccgacacgacgacatcgcggatgacgacgcgcctgctgccggtaatacgcaaatcgacagcggcaagcgcggcgacgattgcgatgcagcctaccgttgaaaacaaatacgcaagtaccgtagagcagtcgcgcaacccttctggcagcgccgctaaagcctgcaaaatattggtttcacgcattgtcgcgattgccgaattgcgcagtgcgacgccaatcataggcacaatgccgcacaatatggcggttgcgattaccacagccgccgctctcgcgatgcttccgttcttcatatgcatgatttcagttaagcacagttcaccataccgttgccgtatgttcacatccggggtatccccgaaaatcgaggattatccttcagggggcttccccgacacgcgcgctgcagacggccgcgcaacacaaatatggcatacccacacgggaagtaccgcgaacgatgcgagaatcggaattggcgtttaagaaggaaagaaggaaatatgaccgaaccaatcgcaatgaccatacgccatatgaaaatcgaggattattcgctggtatacggactgtggacacgatgcacaggtttcactatgagggatatagacgattgcgaggatgcgataaagacgtttctcaaacgcaatcccgacacctgtttcgtaactgaggacgatgacggaaggatcattggcgcgattcttgccggtcacgacggaagacggtcacgcatctaccacacggcggtcgaccccgacgcacgcggtaggggcattggctcgatgttggtgggccgtgtggttgaaacgcttcgtgcaatcggtctgccgaaagtcgctgtcggagtgcccgcagacaacgacgccggcaacgatttctgggaacggcagggctttgcagtccgtgacgatttggtttatcgagaactgccgttgtaataacgaaccatccacgatgccgtgcacgtcgcccagcccacgttgttcgcggacagcaagtagaagccggccagcatgccgccccacccatggacacgtaggcagcggaggcgatgccgcggcccaacgcgttcattacgtggcgcagcagccacgtgtcaagaggcccctgccgtaacggaagtccgagaggccaccgatggtggatcgctgttcggacggaagacacggtttaggcgagcgagctatgccttggctagcttcttgtgcctgagagtgtaaacggcatcggcggaatcggcgacacgcttggaatgcgtcaccacaatgacacatttaccgagttgatgagcggcatgccgcaaaagatcaatcacctcatcagtcatttccggatccaggctgccagtcggttcatccgccagaatcgcgcggccgggcgccactagggcacggccgaccgccactcgctgacgttgaccgcccgacaggtgcatgatgttgcgcttcgattcctcacggctcagtcccaaatcctcgaggatcttcatatcggccttgggattgaccaaacgcagattctcttcgggagtgagatagtcgatcagattatggtcctggaacaccaaggacacgtgctcgcgacggtgctttgagtaacccgtcgtagctatatcctcaccctcgaaacggaccactccatcagagggggcatccagaccggccaacagagacaacaaagtgctcttccccgctcccgatgggccggttatcgcatacatctttccggattcgaaatctgcgttcacgtccgaaagaacgcggatcttcgccgcgccgtatgagtaattgacatggtcccattgcagacagatagtcatgattaatatctcctaacgcatagaggaaagaatggatttcggggatttagccagcactgcggcgcacgacacggcgagcgcgattgcgatgaccgcgcatccgagcagcagaatgagcagcgtctgttctggcggcagagtctccacctacaatgattcaagaggcgcgactcccgaatcgtgcagcaggagcgaggacacgtaaccagacaatagggagcctgtgcccagcgagcacagggcggcgaccacagccatgagaccggtttcgattgcgaactgggcgataatctgcatcttgccgatgccgagagccagaagggtgcctatctcatgaatacgtgagcggatccagaagacaagcgccatgcccagtaccaacacatcagccaagcaaacggacaacagcaccatacgaaccagatcgcgcaccgtttccaccgactgcagcacgccggaaagccgcgccgagtcatcggtgacgccatacttgcttccagcgatttttttcgcttgggccactgcggcggagagagcctgcggattatccgagaggcaccggatcgtgccgacccgttcctctccagtcagcgcggaaaccacttgggcacccgcatagataagattctccgatgcgtccgatggcatagggctctgtgcctgcacattgccagagaagattccggccacgcgaacggtggaatcgcggtcttcctgactgagccggagtgttgatcccaccgatagcccattctcacgtgcgaaatcccggtgaatcagtacgttccggccattacctgaaatgtggtgtccttgttccaaccggtacagaccgctttggaactcttcggacaacgaggagtcagtggtgcccagcacgctgacctgcgtggatagaccggaatccagccgaggaccatgttcggggacaaccggatgcgctccatccacccctgccaaggtcttacgctcgtaaacggtttttcctacgccggggatgcgcgagaaccggctcgcttcctttagacttgcaggattctcgcctgtgtcgacagtaaaacctattcccatgcttctgccgatatcgtcggacattttctgaagtgccgttgacactccaacctgagccacaagactggtgaaaaccatcagcatcagcagtccgatgattccgctgcgtaccggtttacgcacgattgccagcgtggcacgattccacacgttcatgcccgtcatcggagctccgacaggcttcgcggcgacttgcgcagcatcggtatgcacgatatggcgacgcataccagcatcaccgccagcaggccgagcgacacatacagtacggcagtcgtgtcgatcgataccgtgagcgaatccaaggtacgaaccgacatattggattcgagatcgccgccaacctgccccatgctgctcagctccttcgccgcggaggcgttcacggaacggagggccgaagtgccaagccattgggccactcctcgtgcgcacaaccatccgagggccagggacggcagaccgatcagaatcatctcggttagatattgggcgatcagggatggcttgccgatgccaagggacaccagtacgcccatctcctgacgtcggtcgttcatccacagtaagagcatgagactgagaactatcacggccgaaatggtcacgccgatcaaagcgccgagcatcatggaacgcacacctcgggcggcattcagcatgctcgacgtatattggtcattgcgtgtgatctggtagttgttccaatccactggaagcttcttcgccgcttccatggttttctccacgtcgacacccttgtccagaacgaaagtggcatcctgatatatttccttgccggccttgtactggtacagagtacttgtagtgtccaaatcggtgtacacagtgttggaggtgagttccgcgcggctggatacctttctgtcgctgtcccctttgaatattccaacaatggtggttttgacagttgccgttgaatgcgactcattgtcggcatcatatggattgaccttgagcgtgagggtatcgccgactttaagcccattggttttggcgagatcctcatggaccatcgacatatgcttatcggatgccttgagatgacgtccttcgaccatgccgagcgtgtgagacgtgaacacattgagttttgacgaatcgtttgtgcctatgacgttggccgtattaccgaactgctattctttctccgcatcgtaatcatcgccgccgggggaccttcaccacgctggctcccacgagatcggcggtggcgttctgcctgaccatgtacgagtcaaccccggacatcttcgagattcgttgcacatcagcgggacgaaccattccgcctccgcgaggtgtcagcatgctgccttgcaggttactggccagcacgaatccgccgaccgcctgtttctcaatctgtccagcctcatgttgcgctgcccgagaaactgcggttgcggacaacatactcgccgttatggtggtcagcacaatgaacatcactgcggtgcgcactcgctttctgagcacatagcgcgccgctcgtgagatgaatgtcattaataccccctgtgaagctgggaccttctcatccgagacaatgaaatctaattcgattcttcgattggtcattcgccaaaatacatggttcgcctcggaacatggcaagatatgccttgagcgaaaaagcgaaacaacattggttgcattatgtgccggggcctcgttcgttttgttcatttgacaaactttgaacggctataaaacagtgcatataccaatggaggccccaatcgaaattggggcctccatcagagagaaaggaaggagtggcaagtattggttatttattcggtcagaatcttggccttctcgttgacgcttcaaccgtctcgaccgtcttgacttcctcgtcggggatctcaccggccgcgagcttggcttcgagctgctcgacgatttcggcgtgcatcttctcgttgatcttcaccttgaacatgaacaccagcaggctgagcacgatcaggtcgagcggcacatagaaggcgcagacttcgaaggtgtggatgttcgcggcggtcatgtcggcggcggtcgcgtcaccggtcatacctgccgcaacggcgatgaagccgacgatgccgttcgacagggcgccaccgacaccttgttcaagaaggttttcagcaagtaagatttgagtctttatcaaacgcctcggctgctgtgatgaaccggtccagcagccgaggcgttcccatatatgccccagccgttcccaaatccacctatccgcttcgccgacttcgtccaactttcccgacaatgccattgctcaatggcgacgaaggatcgcagaacgcattggccattgcctcacggaacgcctgacggccaaaatcaggcagattgacatgaaccagaccgctcatgatttcgtgattcggattccaaggcttcaatgcgttgatgtgcgagaacatatcaaccaacggcatccgcgaagggctcggcgttgacggccaaagacgcccctttcatcacttgaaacacttccgatgccatgggcatgaaacgtcggatcgcatccaccttgccgatggccagcactccggcaagcgatggttgcggaccgtagggaccgtccaccaccatcaacaacgcatggtcgaggtcatcgtcatctaacagcagcaatgtatcgccggaattggtgagacgaatcctgtcgcgcaaccgttcgcgcgcgacaggatcccagtcgtccaatcgtgattccgcgcgggctgggcgctgtagtcgtagttgcgcaactgggataggcgactgacgaaccggctcgggaacagcggcaccacctcgggcgttccatccgccttcagacggcgctgtcccgcccctggatactggacacaatctgcaagttgcggtctacctcgatacacgccaccggcaacccgttgtccgcatggatgatttcagcacgcaccacgcgacctgcggcaccgtcttgctgaagaagataaacaccgccagcccgtcaacgctgcgatgttccctgctaacaccggttaccgtgccgttgtcttcgatgccaaggtacaacgacccgttttttcggtattggccaacgccaccacgttgtccacgagctcatcgtcaatctgaggtcgggatgcctcgcttgtaaactcaaccgtcaggctttcatggttcagcagcacaagtttactcacattgataccgttccataaccgttttcgatgtgaataagctcacggtcacaacccacgataatcggccacggaatcaccgtaacggcgttatagtgctgtttgtcggcgtcgacaagagccagcggcgccgatggaaacaacaccaaagatgttcagcgaattgttcgcagtacatgtggtgtgcatccgtttcctcgacgaaactcctcttgttccaaccggcaggtcatcgtacgccagttgcgaaaggattcgcctatacatggcaaggtttaccaagaatcgttggaccagcgcaatcatccccgcactattgatccatatcccaatcggcaccgtctattgctggagcgtgttcaagcagttgatcgcggaccagcttcacgccagccccgcctccgtggaatggggcttctctctcgccatcttctttctcggcatgtccgctgcattcgccgggccgatggttgagaaaaacatcaagaaatctgctcttatctcaatggtctgctttgtggtcggtttcgccggtacgggcgtgagcatcgccttgggattcctgcccggcgtgttcatctgctacggcgcgatcatgggtgtcggcctgggcatcggctacctgaccccggtcaagaacctgatgctgtggttcgccgacaacaagggcctcgccaccggtatcgcagtcgccggtttcggcttggccaaagccattgccagtccggtgatggaatacctgatcggctcgatcggcctggtgaacatgttctatacgctcgccgtggtttacgcgataatgatgctcgtgggattcctgctcatacgccgccccgccggctgggtctatgatcccgcgacctcctatgtcagccgcgtctcgattcttaagaaacccgtgttctggggcatctggctcgccttctacatcaacatcacctgtggtctagctcttatcagccaagagaaagacatcctgcatgatgtgctgaaggcgttcccgcagtacgctccgctaagcccgagcgcgttcgcggccgccatttccggcattatcggtttggtgctcgccgtggattccgtgttcaacaccgccggccgcgtgggcttctccacgctgtccgatcacctcaaacgccgcgaaaccgtatatcaggtgattttcgtgatatcgatcgccgtatgcctgctgcaggtttgcactaacagtatcgaccgcgctttgttgtgggccgtgttgatgatgctgttcctcgtcaacgccggatacggcggcggcttctccaccctgccggtactgctcgatcagcacttcggcacgaaaaccgtatccaccacgcatgggctgaccttgagcgcctgggcattcgccggcttgtccggcaatcagctggcgtcgttcgtcgtcacgcacacccccgatcaggcgcaccgttatgccgcgttgattccggtactcatcgtgctgttcataatcgcgctgatcagtatttcgctggtcaaggccgcaggcaagcgcgtcgccgtcgcctagtcccccataggttcgtggttcctagttcgtgggattacagcggataatcccacgaactgggtgcctgcgccatcgcatataaatatgcccggaatcaagccaaaacctgattccgggcatattcgtcatcgcgtggcattcggttcacagaatcaggcgacggaatcccgtgggccgaagcgtgctcacgcgcttatcaccgtttgtcacacgcttgtcacgcgccgatgagatcaagcatctgaggaatgctcttcttgccgaattcgacggtctgctcgccaccacggttgatgacgatgcagggcacgctcatcgcgccataatggtccctaagctcggggaagtgcgcaacatcgtaggcctcggcgcgcacggccgggttcagcgaggcgatgcgctgggaagcaagcactgtctccgggcacatcgtacaggtgagcgagacgagaatcatgatactcagcgggcttgcaatggactttgcccgttcgatcagatcatcgcccaacggctgaccaggaccagccacgttgtacaggcccaacacgaacgaattaaattcatgaccggaaggcacgccatggaaggcgagaccagtcggctcgccatccaccaccatgcgcacgcatggacgcgctgccggcagcacgctgtcgacgtcgaataccgcacgacccgtatcatccttctcgtactcaccatcatccaccgtcgatttcagcttgccaccggacagcgcgaccaacgcatcgatgaatccccgcagttccgtggacagcggcgtatcgtccagttccagagcaagcgtgaccggccgagacatgcggccaaagaccacgttgagctgctgcctggtggcgtcggagaacaattcgccgggcttcctaacggcgttcgccgcggcatcggcgttgcgtttggtggcgggcgcaggcgtaggtgtaggcgctgtagcgtccaacgaggcagcatctgtcttcgttgtggactgctcgtaggcgcaagagaccgggcgctgtggcgtcaaaccggttttctcgctcatccgcttggcgtaccgttccaactccactgcggcaatagcgccatcggcggtggcagtaaccacttgtcgcaggttcttggcccgcagatcaccggctgcatacacgcccggcaccgaggtttcgagatagccgtgcgtgaccacgtaaccataatcgtccagttccaccacgccgcgcaccagattcgtggcgggcacatatccggcgaacacgaacacgccgaacgtgccgccatcagcaggtttccacgtttcggtctggccagtggcccggtttaggatcgaagcttcacgtaaaccaccttgcccggcagtgacaccttgcagctcgacctggtaacgcacgtcgatcttcggattgttttttgctgcggcggccaccgcagcgtcgcaagtgaagtcctgttcccgtacgagaacggtaactttggaggcgtatgtggtcagaaacacggattcctcggctgctgcgaaccctccgccgaccaccagtacttccttgccggcaaagaactcgccatcgcaggtggcacagtaggccacaccgcggccagcatattcggactccccttcgaaccctagtttgcgtgggctggcaccggtggcgatgagaataccaaaagctttcaagtcgccgcgcgaagtatgcacggttttgacatcgccatgcacgtcgaggccgatggcttcggcggaaaggaattcagcgccgaaatcctgcgcctgttgacgcatggtctgggtaagcgcacggccagtggtgcggccaacgcccggatagttgaccacctcattggtgatggtgatctgtccgccaaaatcatctttctcgagaatcagtacgcgatatcgggcacgggccaaatacaatcccgccgtcagaccagcgggaccgccgccgatgactatgacatcgtacaaatcatttcgagacataacgactcccttcgtgccttgatctggctattcaggaggtgcccggaggattctcctgggcaccccgtcggattagcttgacaagccgtccgtcaagcgacgatcacagttgaccaacaagatcaaggctaggttcaatagtgtcctcgcctggagtccagttggcagggcaaacctgatcgccatgttcgtggacgaactgagaagcttgcacacggcgtagcagttcttcggcattgcggcccacattggaagagatgacttcataagccacgaccttaccttcgggactcacgatgaagtcaccgcgttcggccatgccatcgacttcgttgtaggtgtcgagatccttggccaatagagcggtcgggtcggcaagcatcggatattgaatcttggcgatcttttcattggcgtcatgccatgccttgtgcacgaagtgggtgtcgcaggagacagagtagacctcgcatccaatttccttgaacttggcgtagttgcgggccagatcctcaagttcagtggggcacacgaaggtgaaatcagccgggtagaagaagaacagggaccagtggccgagcacatcagccttggtcacctcatggaactcgttgttctggaacgcgttcaccttaaaatcggtcagttcatgctgcaggagagtcatcatcggtcctttcgctgattgtcaattatcgggcttctgccgttttccatcgtaacgtgattctctggaacccgcgcgggcgtaacgcgtgagcctcatcacatcattactaacagtcacgctgacggaccatgcgatgcaagggtgttgtggattgggagcctcccgcgcgtcgcgggaaacacgaaccaaaagacaaacaaaaaaagggggttcccggagcgtcacgctcgacgggaaccccgacgttgaatgcggcggcgtgctactctcccacaccctctcgagtgcagtaccatcgccgcgaccaggccttagcttccgggttcggaaagggaccgggcgtctcacctgggccatgaccaccgcaaaaccaatataacggccaaccccgatcggccggccggcaacggaaccagccacacgaccgattccggtcgtggcggtccgggaaccggacaacggacgcgaacaaccaaacgcttcaccggtatcgtttccgtgaccacaagaaaacaatgctccttgccatccaacgaaagaaaccaccacaggacgagacccgacccaacaagcgggtcggaaagtgtgccgcgttcgcccgttagtaccggtcggctccacccctcgcgggacttccacctccggcctatcgaacacgtgttcaacatgcgggctacaggcgctccggggagcgtcaaggaatcctaatcttggagcaggcttcccgcttagatgctttcagcggttatccctcccgaacgtagccaaccggccatgccgctggcgcgacaaccggcataccagaggtccgtccacccaggtcctctcgtactatgggcaggcctcctcaggattccaacgagcgcagaggatagagaccaaactgtctcacgacgttctgaacccagctcgcgtgccgctttaatcggcgaacagccgaacccttgggacctgctccagccccaggatgcgacgagccgacatcgaggtgccaaaccatcccgtcgatatggactcttgggaatgatcagcctgttatccccggggtaccttttatccgttgagcgatgccgcgcccgtgcgccggcaccggatcactatctccgactttcgtccctgcccgaaccgtcgttctcgcagtcaagcccgcttgtgcgattacactcgaaacccgattgccaaccgggctgagcggacctttgagcgcctccgttactctttgggaggcaaccgccccagttaaactacccgccaggcactgtccctgaacaggatgactgttcgaggtgagacgtcaaacgagaacagagcggtatttcaccttgcggctccacacgggctggcgcccatgcttcgaagcctcccgcctatgctacacaatccgcgcctaacgccaataccaaggtatagtaaaggtcccggggtcttttcgtccttctgcgcttaacgagcatctttactcgtactgcaatttcgccgagctcctggtcgagacagtggggaagtcgttacgccattcgtgcaggtcggaacttacccgacaaggaatttcgctaccttaggatggttatagttaccaccgccgtttaccggggcttgaattcaccgcttcaccccaaaaggggctgacggatcctcttaaccttccggcaccgggcaggcgtcagtgcatatacagcggcttgcgccttcgcatgcacctgtgtttttggtaaacagtcgctaccccctggtctgtgccacccccaaacgctccgagggcaagcctcttcacgcccgggggtctcccttataccgaaggcacgggagtgatttgccgagttccttgaccaggattcgctcgatcgccttggtattctctacctgaccaccagtgtcggtttggggtacgggcggcgacgcccctcgcgccgaggcttttctcgacggcctggaccaccggatatcgcgccaaaaagacgcccatcatcacacctcaccctacatgccccacggatttgcctatgggacgggctgcgtgcttgaccacggaaaaccacctccgcggccggctcccattccgtgtcacccctgtgcgctagcctaccaggactacgctcccaacgaccgcggacaccgaaccccgaagggaacgacgccacgcgaccggaggttagtactcatccgttcggctcttacggtacgccgccggtacgggaatatccacccgttcatccattcgactacgcctgtcggcctcgccttaggacccgactcacccggggacgacgaacgtggccccggaacccttggtcatccagcggacgggatcctcacccgtctctcgctactcatgtctgcattctcactcccgcgcggtccacggcacggttccccggccgcttcgccccacgcgggacgctctcctacccaacggccgatacgaccgctgccgcgtcttcggtggtgtgcttgagccccgctacattgtcggcgcggaaccactagaccagtgagctgttacgcactctttcaaggatggctgcttctgagccaacctcctggctgtctatgcgactccacatcctttcccacttagcacacgcttcgggaccttagacgacgatctgggctgtctccctctcgacgacggagcttatcccccgccgactcactgccggaatacacatccacggtattcggagtttggctgctattggtaccccatacgggcccgcaagcatccagtagctctacccccgcgatgcaatcaaccgacgctgcacctaaatgcatttcggagagaaccagctatcacggaatttgattggcctttcacccctagccccaggtcatccccccggttttcaacccaggtgggttcggtcctccacgcggtcttacccgcgcttcaacctgcccagggctagatcatcccgcttcgggtccagggcgcgcgactcaaaacgccttttgagactcgccttcgctacggctcccccaccacgggttagcctcgccacgcaccactgactcgcagactcatttttcgataggcacgccgtcaccccacagggaggctccgacggattgtaggcgcacggtttcaggaactctttcactcccctcccggggtgcttttcacctttccctcacggtactggtacgctatcggtcagacaggtatgcttagacttaccccacggtcggggccgattcacacgggattccacgaggcccgcgctacttgggacacatgatcggaagacggcaagcttccaggtacggggctggcaccctctgcggccaggccttcaagcctgttcccctggcaagccgttttatgactcccgcccggtccgtcggaaccgggacacacgctcccgcaacaccacgaacgcaacccccgacgggtatcacgcgcccatggtttggtctgatccgctttcgctcgccactactcacggagtatcccttcctgcaggtactgagatgtttcacttccctgcgtacccccggaacaacaaggttccgtgccggcccatgacggccggcgggttgccccattcggaaatcctcggatcgaagccatgttggaggctccccgaggcttatcgcatcctcaaacgtccttcatcggtactgtctgccaaggcatccaccatacgcccttcagggcggcacacgccccgaaaaaccctaatgatagcttcaaacgccagacgacaaatcatcacactgtaaaaaatgatcacaaaacgatcgatctcgaaaccagactccaaaaaagaagcctggcgaaatcgcgataaagcaagcaggacaaacaatcctgcattgctcgcgtccactatccagttctcaaaccaccacgcgccccgaccggacccgacccacaggcccacaggcccacggcgtcccgccaggggcatccggaaaaccgcacgcgaccacaacggtcgggcgggtggcggtccgggaacccaaaagcatatccgcaccactccccgcacggccccaaggacccgcgaagccaacgatctcttccacaccagcacgcccgcgccaaaccggagacgatccccggcacgcgggccacacgacggacgccagaccggcgtcctgaaaaactccgtagaaaggaggtgatccagccgcaccttccggtacggctaccttgttacgacttagtcccaatcacgagtctcaccttagacggctccatccacaaagggttaggccaccggcttcgggtgctacccactttcatgacttgacgggcggtgtgtacaaggcccgggaacgcattcaccgcggcgttgctgatccgcgattactagcgactccgccttcatggagtcgggttgcagactccaatccgaactgagaccggttttcagggatccgctccacgtcgccgtgtcgcatcccgttgtaccggccattgtagcatgcgtgaagccctggacgtaaggggcatgatgatctgacgtcatccccaccttcctccgagttgaccccggcggtcccccgtgagttcccaccatgacgtgctggcaacacagggcgagggttgcgctcgttgcgggacttaacccaacatctcacgacacgagctgacgacgaccatgcaccacctgtgaacccgccccgaagggaggccatatctctacggctgtcgggaacatgtcaagcccaggtaaggttcttcgcgttgcatcgaattaatccgcatgctccgccgcttgtgcgggcccccgtcaatttctttgagttttagccttgcggccgtactccccaggcgggatgcttaacgcgttagctccgacacggaacccgtggaacgggccccacatccagcatccaccgtttacggcgtggactaccagggtatctaatcctgttcgctccccacgctttcgctcctcagcgtcagtaacggcccagagacctgccttcgccattggtgttcttcccgatatctacacattccaccgttacaccgggaattccagtctcccctaccgcactccagcccgcccgtacccggcgcagatccaccgttaagcgatggactttcacaccggacgcgacgaaccgcctacgagccctttacgcccaataattccggataacgcttgcaccctacgtattaccgcggctgctggcacgtagttagccggtgcttattcgaaaggtacactcacccgaaggcttgctcccgatcaaaagcggtttacaacccgaaggccgtcatcccgcacgcggcgtcgctgcatcaggcttgcgcccattgtgcaatattccccactgctgcctcccgtaggagtctgggccgtatctcagtcccaatgtggccggtcgccctctcaggccggctacccgtcgtaggctcggtgggccgttaccccgccgactacctgataggacgcgaccccatcccataccgatgaaatctttcccgacaccccatgcgaggagtcggagcatccggcattaccacccgtttccaggagctattccggtgtatggggcaggtcggtcacgcattactcacccgttcgccactctcaccaccaagcaaagcttgatggatcccgttcgacttgcatgtgttaagcacgccgccagcgttcatcctgagccagaatcgaaccctccacaaaaaaactttgcagaaagccaacatgtgactctcaaaaataagaaaattgacgatcgccttataaggaaaggcgcatcgcacgaaaacctcaccgtccttcaaggcctcccggccactcgcgaacgagcggacgatgaactggcaatcattgactataaagaagtagtacaaatacgctcttgagttctcaaaccaccaccactcacccgcctcgaggcaccccaaccggggaaccactcgccgagcagcagcaagagataaacctacagcacaatcccattccacgcaaatcgggcatgacgaaacaagacgcgaacccttgcaaacactggaaagcatcggcgtgtcgaaatccgtctttcttacaccataaatcgcaaaaccaactccagcacaacccaaaaatcgtcagaaaaagctgattgccgcgtgtcacacaacgcaacaacacggcaatcagcagatcaacagcgcatcacagcaagtcacagacgatcggaaagccaatcgaacaccaaacgcaacgcgcgagcgctacggaatccgtaacaggcatggcaggcgttatcgagcttgtagaacgtcacatccttgccaagcgctttcaacgtggcatacaggcgacaactctgattgaacggcaccaactgatcgcggccaccatgcatgatcagcgttgacggagtgggcatatcggcactcagataagtcataggcgaagcctgggcgctcaaatccggatgttcaagcacgtcaccgccaccaatcaccacaccttccgggcactgcggatcactgtggttctgcgaactcggataaaagttcatcttcgcgaaatcagtagggccatgccaatccacgatcgcgttcacttcggcgctttcctcggcataggcatccgtatcaggcgcgcgattgccagtgaacccagccatcaacaccgtatgaccgcccgaagaatcgccccacagcgcaatacgatccttgttgcaatggaagcgttcggcattcttgcgcatgaaacgcaccgcagtcttgcaatcctgcatctgcgcggggaacggcgcaatatcgctgtgacgatacttcagcgcagccaccacatacccctgctcggcaatacgcacgaaataattcgagtaatcggtcacattctgctcgtggaatgccgaaccgcgcacaaacacaatcaccggccaaccaccttccggcattgcgccctcgggcatattgtcaacgccaggcgtgaatacccacatcggcaaatcaacactgctgccatcagccagctgacgggtcacgtatgtaacctgctcgatattcacgggatatccgaaatcatcctggtccaagtcggaaatcacttggcagccttccggaaactcatcagtgtgcgggaagaacttagtctgctcgcggcgtcggaatcggggcaagccgtgtcggcgacggcggcgccaccatcgattcgatatcgattgccccgatcgccgtaaccgtctcggtcgtttcggcagtctcggccgcatcagcgccatcatcggcaatgttttgtgcaatatcagtagtcataatgcacctctcattcctttccatgcatgattattaagattgcttttctcgaatttgattgcccgatgttccctgtttcacgtgaaacatcagaagttacgtcgtgcggctatacctaagatatgagcaaaaagatcgcagtatttacgggggcggggatttccacgtccgcaggtattcccgacttccgtggaccggatggcgtctggactaagcaccctgaacaaacgaaagtgtatgacatcgaagcattcctttgccacgaggaagatcgcaagtattcctggcgttggcagaaggaatcacccgtgtggaccgcacagccgggcaccgcacataaggcgctcgtcaaactggaacaggctggcatgctgacgctgctcgccacacaaaacttcgacgcattgcatgaaaaagccggcaatagcagcgacgtcatcgtcaatctgcatggcaccatcggtacctcgcactgcatgaagtgccatgcaaaatatgacaccgccgacatcatggcgaatctcgacaacgaacccgatccgcactgccatcgcagactgtcctacagcggcaacatgccatgcaacggactcatcaaaaccgacgtggtctacttcggcgaggcgctgccggacggcgcgctcgaaaaatcgtatcgactcgcaacgcaggccgacgaactgtgggtcatcggatccacgctggaagtcatgcccgcggcaagcatcgtgcccatagccgcagaggcgggcgtgccgatcaccattatgaacatgggacgcacgcaatacgatcggttggccgaccggcttatccacgacgatatcgccgtcgccctgccgcagctcgtcgacgaaaccatcaccgccgagcagtaagccgcacagtaaatacgttttctcgtacgtcttgcagtaccggcacaaatcgttggaattacaccggttttggttggtcgttaccaaaatccgaatttttcaacgacaaaaatccgaatgacgtaacggctagtcaagcaatataaacaacaaaagggtcttggattgctttgcgacaatcagaaatcatcgcaaggctttccaagacccttattggttatcaaatactgaaaaacggtactgaaatcagtaaatgcgcttcggctggaaaccggcttcccgcaatgcctcgagcacacgatcaatgtggtcgggaccattcgtttcaaccgtcacgcccaaagccacggcattcgcgtaatggctggacgccttgaactggtcgtgatccagcgcgataacgttcgcacgctgctcggccagcaatgtggcgaccttcaccagctgtcccggggtatcgggcagctcgacctcgaaatgcatgatgcggccacgcgtgatcatacccttctgaatcacagcgccaatggacacagtgtcttcattaccgccagacatgatcggcaccaccacatgcggacccttcgcctcagcgaacttgcgcgagcgcaggttgaggtgctcgagcgcagccagagacacagcgccggcagcctcaaccaccagcttgtgcttttcgagcatgagcaggatcatctcgttgatgtcacgctcggtcacggtgacgatgtcgtcaaggaattcgttgagcagcgcgaacgtgagatcgcccggacgcttcacggcgacgccctcggcggacgtgcgcacctggtcggcggcaaccacatgacctgcggccagcgaattcttccatgctgggctaccctccggaatcgcgccgatcacacgcacttccggcttgaacgtcttgatggcgagcgccacaccggcaccaagaccgccaccgcccagcggcacgaccacgtcggtgacgttcggcacgtcttcgaggatttcaaggccgatggtgccctgaccgcacagcacctcgtaatcgtcgaatggcggcacgtagatcatgccttcggtgtcgctcaattcctgggcgcgggctgcggattcgtcgaacacctcgccgtacagcaccacgtctgcgccgtacgccttggtggcgtcaaccttcagcggcggagtgatctgcggcatgcagatcgttgccttcgcaccacgttcgcgagccgcataggccacgccctgcgcatggttgcccgcggaagcggtgacaatgccgcgagccagctgctcatcactcagggatgcgatcttgttgtaggcgccgcgaatcttgaacgatccggtgacctggagattctcaggcttgagcagaatctcatgtccggtcatgtcggacagcaccttggacggaatgatttccgtgtggcgcgcagtgcccttgagtcgttcggcggctagtttcagttcagctgcgtgatcgcgctgcaatgctttgagaacctcgttttgttccatgagcgttattgtaagcgtacgtctgccgaaactgccttatcatgcggctttcgcgatgaaaagtgagattgcttgcgaaaagtaatcacaagcaatcaggaataatcgcaatacataatctgataaatcacaatacaaataaagaaaaagcgttcgtacgatcccgtgatgaatcgcacgaacgctttttgcagagagtttataggaaagatcgatcagagctggatcacgaccccctcccagcgagcgagctcgccgcgagcgaccgactttacgctatgcacggcatcataggtgctgagcagtacctgcgactcgcccacgccatcctcaagcagttgcgcgacctcagcaggcacctgcgccgtcctatcagtgagattgacgatgacaagaatcgtgtcgtcgccgctggtacgggtgaaggaatacacctgctcgctgtccgccgcgaccagattccattcgcccgtcgcgatggtcgcgttgttgtggcgcatggcgatgagcttcttgtagaagccgtacacggatccgggatcgtcgaattcctcggctgcgttgatctccacatggttcggattgacgccgatccacggttccgtcgccgcgtccggcgcggtgaaaccggcatacctggaagcatcccactgcatcggcgtgcgtgcgttgtcacgtccgatgagcgcgagcgccgccatcatcgattctgcggactggcattttgcttcttccacgcgctggcggtaggcgttgatggattccagatcgcgatactgctcgagcgtggtgaagtgtgcgttggtcatgcccagctcttcgccctcgtaaatgtagggggtgccgcggtgcatgtgcagcagcatgccgaacgccttggcgctcagctcgcgcgactcgcggtccgtgtcattgccccaacgggacacgacgcgcggctgatcatggttgcagaagaacaggctggcccagccggcatccttcacagcctcctgctgcgcggcgaggcgggcgcgcagattcttgacttcgaacggcacggtgttccacttggagcccttctggtcgatgcccacgtggtcgaagaggaacagcatgtcaagttcgccgttcttcggatcggtgacatgctcgttacgtgccggagtgatgcccggcgcttcgccgacgttcatgtagccttcgcggccttcgaacacttcgcggcgcatttcggcaaggaactcgtcgatgcgcggaccgtcggagcaccatgggaacgggctggaatagccttcctcaccaaccggataatcctcaatctcgcagccgtcttctcccggcagcttgccgttcttatcaacagtcttcgaaacctgcgtgatcacatccatacggaagccgtcaatgccgcgatccatccaccaattcatcatcttgtagacggccttgcgcacttccggattctcccaattcaaatccggctgcttcttggaatactggtggaagaaatactcgccgcgcttcggatcgtactgccaagcggaaccgccgaaataggaaccccactggttcggctcggcacccggagtgcccggctcatgccccggcctggctggacgccaccaataccagtcggcatgcggatcgtccttgtcgcgggaagcctggaaccaagcatgctcgtcggacgtgtggttgaccaccaaatccatcacgatcttcagaccgcgcttgtgcgcttcggcaagcagctcgtccatatcctccaacgtgccgaacagcggatcgatatcctgataatcggaaatatcgtagccgttgtcgtcctgcggcgacttgtagaccgggctcaaccacaccacgtccacgccaagatcggccagatagtcaagacggctggtgatgcctttcagatcgccgatgccgtcgccgttcgtgtcttggaaggaacgaggatacacctgatacaccaccgcgttggcccaccacgggttcggggtcgcgccgttggaacgcacggtgtcgggaagggtggaacgattgaaattcgtcatgtcgtggagctcctttgcttgacgtttgttggattttcgttcgatctttcgtgactgactctgcccgttttcagctcatgtcagcttcatgcagaagatcgattttgcctactcccctatggtatgcaaccctgtttttctttctttcccgcggcgagttttgcaaagcaagaaaagaatacgcttcttacggacgcgaaaaaccaatccgcaaaaataaaaacgcgggacgttccagaaagggaaatggaacgtcccgcgctggggagtgggataggccagtcccgctcagagcggtgaagtgttacttcctgaacggacggcctacggccgcgttgtccctgccttcgctcgcctatcggctcgctcagggagagcctatgaacagaccactgggctgttcacttaacggctcccctcatcacaccaccgacgacccacttctgggcgaagatgtagacgatgaggaccggagccatggccatcagataggacgcgaaggccatcggatagttcgacgtgaactggctttggaacacgtactgtgcgagcggaatcgtctgattgctctgatcagtcagcgtgatcaacggcagcaggaagtcgttccaagcccacagtgcggtcaaaatcgcaatcgtggcattaatcggacccatcagcgggaaaatgattgtccagaaaatacgccaggtggaagcaccgtcgatacgagccgcctcttccaacgaaatcggaatcgaacgaataaaaccaatcgcaataaacaggttggtgccgatgccaagaatcgtgtacagaataatcaaaccaagctgattatcaagatgcaacgtacccatttccttcgcgatcggcagcatgatcaccgtgaacggcacgaacatcatcgcaaggaagaagtaatacaggaagcggaagaatcgcttatccatatttcgtgccacagcatacgcgacgaacgtgttcgtcagcagcgtcaacaccaccgcgcacacggtgatgatcgcggagttaagtgcggccttcggatagttcaccttattccatgcgtcggcgaaattatgccattcccacgtggtcggcaagctgaacgtgccagcctcgcccggcgtcttcaacgcggtgaccacagcgaaatacaacggcacgagcacagtaagactcaacaccgtcacaaccgcggtcagccaccagttgaccttatgatccctgcggattttatccggctttgcttgcgcttgaacgccagtctttgcagtctttgcaacagttgcgctagtcatgatatttcctctttaccttcagactttcagacccttgctcagaccttttccttgccgctgaagaacttcagctgcacgaaggccaggattgccagcacgatgaagaacgtgaccgcgttcgccatctggtaggagtattcgccattgccaaggccgttctggaagatcaggtacgagacggtttcggtcttggaatccgggccgcccttggtcaatgccatgatctggtcgaacgcgccgagcgaattcttgaggctcaacaccatgttgatggtgaagaacgggccaatcagcgggaaggtgatctgccagaagttctgccaagcgttcacaccgtcgatcgcggccgcctcgtaaatctcgttgtcgatggtctgcaggccagccaagtacagcagtgtggagtaggcaacgccctgccagatcgacaggaacacaatcgggaaccatgccaaatccggattggaaatcatcgacgtcgacagccaatcaatatgcagcgcctggccgagcgccggcaacggcgtcatgaaaatgtacttgaacacgtagccgatcaccagcaccgacagggtgtacggaatgaagaagatcgcacggaatccgtttttgaacgcgattttcgaattcagcagcaccgcaaggaacatgccaagaaaattcgtgccaattgtaatcaaaattgcgatgagaatagtaaacaggtacgcgtgaccgacacgagaatcctggaacatcgcaatataattcttcaatccgatgaatttaaaatcaccgtaaccctgcgaattagtgaacgagtatgccgcgccctgcaggaacggccaatacaggaagatggacaccagaatcacagccggaacggtcatccaataaaatgccggatcaaccttgcgcttggaatatttcgaaaccttattcttggaagtttttgccgatttcttcgcagtatttgcagtatgtgcggtagtcatgtccgttcctcctctcacctgaagtttctggcttcgatcttgtcgtattcggattgcatgctgttcaggaatttttcggtgttgcccgactgaatcagcgtctgcaggaagcctgcgagattgatgctggctggcacgtaatggtcgcagaaatcggccagcttgcccgcctggtagaagtcgagcacgccattcagcgcttcgtcacccacatacgtgtctttgtagggggtaaaggcggactgctgcttggagtagtccttgatgttttcgtcgttcatcagaaagtcgatgaattcgcgcgcttccttctcatgcttggtgtgcgcacccatggtcagaatcacgtcatcgcctgccgtgagctgctgttcttcggcattatcagttgccggcatttgcgcaaaacgcaggttggcatcgctgttgatgagtcggatctgcggaatcgcgtaggtgccgagtggcagaatcgcggctttgccagcggccagatcctgcgtagcctgctggtaggtaactgccggattcttctgcgtgtaattctggtagatctcgaccagctgatcgctgacagtgccccacaggtcggagaatttcttcgatccgtctttgagggaaagatattcggattccggcaccagcgtggaattgagtgacgccagcggcgcctgaagtgtccacggatcggcagtgctcgcttcgatcggtacaatgcccttgctcttgaagcgttgcagcaggtcgatgaattcgctccatgtctgcggcggattgtcgggatcctcgcccgcctgctcccacacgtcggcgttgatgatgtagccagatgcgttacccgcatacggcaggccgtacaggcgcttcttggattcgtcgttggtttgcacaaggctcttggcgatgttcaccatgcctggattgagttcgtcgacgatgtcgtcgtcggtgaaatcgtggaaaacacctgcttcggcgagcataccgaaattaatatcgccattgatggtgatgacatcgggttcgcgatttttcacgagtcgcgtacgcagatcggtggttgcgtcggacgaattgttgacgttgactttgatgttgggatgggttttctcgaattcctttgcttttgcggtgaaccagtccgccgcttcggctttatactggaagaaatccaaagtgacggttccagcggtgctgttgccgcaacctgcaaggccggccgtcaacgcgattgcgcatgtggccgtgagagcgcggtatacaatcctcctgaatttacctacactagtggtggaatcaggtttcattctcgactcctttgtattttttctctattacggtggagcggcttccttaccacaccaccgttactgagaattatagaggggagcggttttcattcccaactcagcgcgcctgtgcggggcggaaaacaaaaacgacgagattttgttactctgagaaagtaatttgacgcacgatgtgcgcgaacgggagcacgaaggatggttcagatggcggtttcacctctgccacagtggtttgaaggctcggaatatacccataaagtcgcggcttgcatcatgaaatatggtccgatttcacgcattacgttggcgcagattttaggactttcgcagggtgctgtttcccgaattaccagcgatctgatttatgcgggcgtgattgaggagacgccgatgccgtccggcaaggccggcaaactgccgaaaggtttcgtgcagaaagaaaatacggaacgtcgcggccgcccgcaaaccggattgcaggtgattgcgaatgcgcgatctttcgttggcatgaaaatcaacgcgacgcatatttcggcagttgcggtcaacgcaatcgggcagatcatcaccggatgccatgatctggaaatcgaagacgcttccccgcagaccgtggtcgcgctgatcaaacaactgacgaccgactgttccgacgaggcggagatggcgggctggccgaaaccgtgcgccgtgggaatctcgcttggcgggcatattgtcgacggtaccgtggtgacgttcgcaccgttcatgcactggtcgcagcccgtggaactttccgtcatggttcgtgaggcgaccggattgcctaccggaatttacaacgatatcgattcgttggtggttgacgcctgcctgtttggaccgggcgttggattggatagcttcgcggtgctgacgttcggcgcgggcgtcggctattcgttgacgttcaacggcgagctggtaagctgtccggataaaagttacggtttggtcgggcatattctggtcgatccggatgggccgcgttgtgtttccggacacaagggatgcgcgcaatgcctgtccgacaactcgatcgcggcggaatattcgcaaatcatcggacatcccgcatcattcgacgatttcgcacgtgacgcacgcgcgaacaaaccgcaagcgacgaatctggtgaaccgcacctgcttccgtctcggcaccctggtggcgaccatcgccaatcttgccatgccagacaaaatcatgatcgccggagaatcgtcgttcatcgcgaaattcggcattgacgacttgcgtaacggcatcaacatgtatcggcatagccaggccgcgccagtggattttgaaattcccgaccacgattgggctttgtgggccaaggctgccgcatcacaggcaattcggcaatatgttggctgattgattgcgattgattgtcttgcaatacaaaaaatcctcccctttgtttcagggaggatttttgttatgcgattacggcttattcggcgctctcgacgggcgcaagcacggccttgaaaaggactgcttgccgaaccgttaagcgggaagcccagtgggcttcccgtaggtaaggggagagagcgcgctattcagcgctctcgacgggcgcaagcacggccttgaaaaggactgcttgcgccgggtgcagtgccggcgggcggatgccgtacgtggcgagcgcgcgtccggtcatcctcacgcctccggccttccaccagccgagcgggctctgtccgttggcgatgtcttgcttggcgaggtcgaggctcacgtcaagcggcgacacctcatacaccttgtcagggtcgagtccgggcaggcgtaccggcgcggccgggtaggtctgcgaggtggtgagctgggtgaaacggtagatggcggccgcttggttaggcatgaccacaccgtccaagcgcactgccggatcggctgcgtcggaatgcacgactgtgtcgacggcgaaccattcgcgatgcttcttgaattcggcgacccattcggcgagcttgtcgatatcttcctgcggttccttgagcaggttccattcgatgcccatgtgtccgaagaaggccatggccatacgcagttcctgcgtggtggcgcggtgcgtggagtgcgccggggatgcgcccacatgttcgccgatcatttccggcggcacgagcaacgaggtgtagcgctggatgtcggcgcgttccaccgggtcgacgcagtcggatccccaaatgcggtcggccacttcgaggatgccgaggtccacgcggccaccgccggaagagcagctttcgatttcaagtcctggatgcgcggccttcagatcagtgaaaatgcgatatacggcgagcgtctgctggtgcactgccgggcgtccggtgcgtggggagacagcttcggtgacgagtttgttgtgatcccacttgatgtagtcgatgccgagttcgccgacgagcttgtccattgcgccgtaaatgtagtcgtaggcgtccggattggtcaggtccacgacctgctgggtacgtccttgcatgggcagacggccttcggtgggcttcaacacccagtcggggtgtgcgcggaacaggtcggaatcagggttgaccatttccggttcgaaccacagaccgaattcgagtcccttgccgtgcacgtaatcggcaagcgccttgagcgacttgtcgccgtcgggccacacgtcctgcgaaatctgccaatctccgaggccggaggtgtcgtcgcggcgggagccgaaccagccatcgtccacgacgaagcgttccacaccactttccacggccttgtcggcgagtgcggtgagggtgtcataatcgtggttgaagtagacggcttcccatgtgttgagaatgaccgggcgcggcttgggcgcgatgttgtgttcagcaagccagtcgcggtgcactcggcgaatgtagctatggaagcgggctgcgacttcgttgaggccttcgccgtaggagccgatgagccatggggtggtgtaggactctccattggcgaggctgatttcgccgccgaacagtacttcgccgccgccgatcacgccgctggtgtatggcaggcgttccgcggagagcacgctgttaccgctccatgctacgtgtgcggagtagacgttgccgtgcgtgaagccgaagcctttttcgccgacgctgagcagcagggtggcatcgaagtctgggcgtccggccatggatgctttggcgaagcggccgagggtgaagtcctggcgctgcggggagcgttcgcgcagatggtggccggtggtggtgaggatttcgttggcgtcggccggcacggtgaatgcgagttcgatcttgccgacttcgagctggccttcgccggtgttcacgacttcggcgttctggcggatgaggccggtttcgtcgagttcgcaggtccagatgagtttcacatgctgttcctcgtcttcggcggtgacggtgacagttggggtttgcttgggttcgtcggccacgctccagttcgggtatccgtctttttcgcccatgacgtaggttttgccagccgccacggtttcggcggtgatgttgctgactgcgaacttgcagaacagttccacgccgtcgcgacgcacatcaaagcgggttgcgccgatccaggattcggattgcgtgggcagcacgctcggccatgaggtgtagtcgagtgcgccagaaacacgctgtggcatttgcgcgtcgaacatgtcgatcacggttgccggggctgcgagcgggcgaccccaatgcacgagtcgcggcagatcattgccggggaatacgagtgcgaacgccacgtttgcggctggctgttcggcgtagaccgcagtgagttcggtaccgttggtagcgttgccatggaaggtctgaatgagcgtcattgcagcatcctttacatattgcgattgccttgtactgtcaccttcgatggtatgacaagcttcatttgttgacgtcgccgagcgtgtttctttctgtcggaaagtatttcttgcgaccatagaatcgcaagaaatattattacgtaaacattaccgttgaaatcgcaatcatctttaccaagatttacttggcatttcaatatttcttacgtttttgcgactacaaaatcgcaattatcgttttccagcgaaaaaatcagtcatcaatcgtgcgcattccgattcacgaacgccgccgataacttccggaacatgaccgacatgcgggtcgcgaggaatgtcccaaatcgaaccgcatgcacccaacttggcatcccacgcgccgaacacgattcgtccgacatgcgtttgcaggcacgcgccggcgcacatcgggcacggctccaaggtaacaatcaacgtgcaatcggcaagattccacgtaccaagcgaccgagcggcctgcgtcatggccttgacctcggcgtgcgccaacggatcggcgtgcgcctcgcgcagattacggccactgccgatcaccgctcccccagcgtcaagcacgacggcaccgaccggtacctcgccttccgcggcggcctcgcgggccaattcaatcgccagctccatgtcgtcactccactgcatacccgccactatacggttccgctcgcgtgaagcgaaagacgaaacacgcccataaatacctcttggtaggctggaagagattgaagaaaacgcgcaaaaaggaggcacgttggcggcattcgagttgattgtatgtattatcgccgccgtcgtactatcttcattcctcagccgtttcattcccaaggtttccacaccgctcgtgcagatcgcgttgggtgcgctggcgtcgcaattgccgtttttcccgaacgtcacgctcgatccggaactgttcatggtgctgttcatcgcgccgctgctgtatttggaagcgcatgaaatcgataaaagcgagctgctgaaatccgttaaattgtcgctttcattggcaattggactagcgatcgcaaccatggtggccgttggtttcaccctgcatgccgcatggcccgcaattccccttgccgcggctttggcactcggcgccgcgcttggaccgaccgacgcggtcgccgtatcttcgcttggcaaggaagccgctcttacgcaacggcaaaccagcgtgctcaagggtgaatccctgttcaacgacgcgtccggcatcgtcggcttccagtttgcgattgcagcggccatcagcggcgtattcgaagtgggcgattctgccatacagttcgtgttctcgttcttcggcggcgctattttcggcttggcagtaggcatgatcgccgacctgttatttgaatcgttgcgatctttcggttgggagacgaccacaagccgtattttgatggaattgttcctgccgttcattctgtatttgggcgcggaagcggtgcatgtttccggtattctttcggtagtgacggccggtttgatcatccgtttcgaccgaaccggcatcggcccgaatgttgctcgcaccaacattgtttcgtcaagcgtatggggggtattctcgtttacgctcaacggcacggtgttcattctgcttggcatgctactgccgaatgcgatgagcgcaagctgggatgatcctcaggtcagcaattggcggctgctagttgcgattcttacggtttccgcagtggtgatcgtcatgcgatttctgtggatttcgttgatgctgcgtctcgcacgagataccgtcaccggtaagcgacgcaagatgacggcacaacgttggcgttcggccgcggtcatgacgttcggcgggccgaaaggcaccatcaccctgtcgttgatgttcacaatcccgtacaccattacgggaggcgcgtggttccccatgcgtgacgagctgatcttcatcgcaggtggcgtgatcgtcgtaaccttgctgctcgccaacttcctgctgcctctgctggcgccgaaccgcaataaagacgcttccgtggaaatgaccgaaatcaccatcgaagtgctgcgacggaccgtggaggaactgacgggacgagtcacacccgacaatcgtcgtgcggtgctgatgatcatcgactcgtatacgaaacgtatcacacgactgaagcagcgcatcggagaaatcgatccgcaagggtatatgcaactgcagatcgacgcgctcaactgggagaaggaatacgtcaaggcgcgactggcgaaagtcaaggcgacgacgaacgacgacaaggcagcgcacgatctggaaatcgaagcatgcgagcgcctgctcgaccagatcatgagctctctgcgccatatcgaaacggaacataattccggacgcaccatctggcgagtcaaaggccgcttcagggcgttgcagaggcgtttgggcacggtggtgaagcgtgtgaacagccgcattcgccgcactaccccgctgttcagcgacgacgagctgttcgcgcacacccgcgcggtgcaggtggatgccatcgaacatgtgatcgaccgcctgtatgaggagatgggccgcgacacgtacaatacggaacattgctcggcactgctgttggattaccgacgaggcgaggctacgctgaggtcgcgcccgaatgtgggcacgagcgcggaggcgcaggcgcaggcggaagaggtgaagcgcgaaagttacggtatcgagctgggtgtgatccaagacatgtacgaggcgggtgacattacgcgcgcgcaatccaagcagctgcgacgcaacgtgtatgtgatgagcgtggacgccgacgcgcagatctagcatccaactgatctgatggaatcagcaagctggcgtgagccggtgatccgcagcgagtttgtctgcggacgaactgtggaaacgtgggggacgagacaactgtaggaacggaacacggcgtggaaggcggcaaactggaggccattccacaatctaaaacatgagggaattgaaattctcagatatttcccagaaaacaccagacatgtactcagcatcgtctgtttatataggagatgtcagcaaaagagccgaccaggaacccacagcagttcccgacaattgaaccctttcttcttctctctcctttctctccccggtggttttctctccaccggggtttctttttgccctcaacgggtggattcctccagccagtgggagaatccgcccgctggcagctcactcaaagtccagaaaccgccactcactggaacaatcaccccgctggcaagccgcccaacgtcccaatccttccagtgactgggaggattgccccgctggaacgggtatattggaggcatgagtgaaatacgcgagcacgagaccagtgattcccacgactccagcaacccaaacaccccgaccggtctgatcgggcgtgaatcgcaggtggttccagggaggttcggcgagccgctgcaggtcacgcacgtacagtattcgcgcgggggcggcaatgcggctccacgacgcccgctgttcctctgcctgcacggttggggctccaatgaggccgatttggccgacatgatgcgttacgtggctccttataacgattttgcttcattgcgcgcgccgctcgtgctgcaggaggctggttccggtgaattcggtttcggtcagggcgcgtattcgtggttccatgattgcgtaccgtccggcaaagacctggatcgagacgcttatgctgccgctcaagccattgacgattgggttgcgcgcaatgttcccgaagatcgcgctgtagtgccgatcggtttctcgcaaggcggtttgctggcgattcatttgttgcgcgtccatccggaacggtacgccgcgtcaatctcgctttccggcttccttgcgccgggaatcgtcgccggtagcgcgccggccgacagtcatgtcgcggaattgaatattcctgtgttctacggctatggcaagaacgataccgtgattccgatgccggagcttttcgcaaccgccgcttggctggacgagcatacgttcctcacgtcgaaaagctaccgtggactcgatcatgcggtcagtctcaacgagttcagcgatttgcgcgactggcttgccgcgcacgatatcgcgccgggaatcctgtaagaaatcctgcggaagaatcccgtagaaaaatcctgcagaaaaatccgatgcaacggattttgcgtaccaagcacacggcaatcgttacaacccgatataagccacgatatagcgataccgcgttagactagagccagctaataatcatttcgcaattgccggcattcgcacgctcaaccatgcgaacgttcgaatgttggcgagcgccataccggcacattcgcgtgcctggcaataaggagtttcgatgctgctgtccgatcgcgacattctcgccgcgcaggccgaaggtcatatttcactcgatccgtggaccccggaaatggtgcagcccgcttccattgacgtgcgtttggaccgtttcttccgtctgttcaacaatcatgcgtacacgtatgtcgatccggctgagaatcagggcgagctgaccgagcagttcgaggtggctccgggcgaaccgtggattctgcatccgggtgagttcgcattgggttccacgtgggagtacgtgaagcttgatccgacgattgccgcccgcctggaaggcaagagctcactgggccgcttgggtattctcacacattccaccgcaggcttcatcgaccctggtttcgagggtcatatcacgttggaattgtcgaatgtgtcgacattgccggtgaagttgtggccgggcatgaagatcggccagatgtgctttttccagctcagctcccccgccgaacatccgtacggttcgcaaggcaccggctcgcattatcagggtcagcgcggtccgacgccgagccgttcctacgtgaacttctacaaagccgacatcaccgactaatcatcaaatattcttggattatcgcaatatattgtcgatatatggcgattgatattcccccaaaaatgcaaaaagattggctatcacatatcgcatgatagccaatctttttggctctgttagaccaaggttgactttttgacttgcgacgtagttaccaagtagctacaatagtggtatgagaacaggtaaggtggcgtgcatagccgatagggtcaggaaggaactgggcgaactgacgccgcaggagcgcgaccttgccgtcaaggcgttgcgcgacgccctgtacgaggggttcgcgttggacgcggcgacgagcgacccgaaacagatggacgcgtgcgtacgctgcggaagtatccgcatcatccgcaaagggcacggccgtgacggctcccagcgttggaagtgcatgaactgcaacaggacgttcggcgttcgcacgaaccgggtgatgggcatgagcaagctcaaagcgggcgtgtggatgcggttcctcgaatgcttcgtggactgtctgagcctgcgcaaatgcgcccaacgttgcggagtatgcatgaagaccgcgttcctcatgcgccagcgggtcatcgagtgcatccgccgatacacgcccgtcctgcattccgaggccgggttgtgcgtgcagttggacgagacgtacttccgtgagagcttcaaaggcaaccacacgaaatcgaccgtgttcgtcatgccccgcaaggcacacaagcgcaccaaggcattaaggaagcgcggtctgtcgaaggagcagatatgcgtggcgaccggagtggatgacgcaggccggtcgttcctgaccgtgtgcgggcgcggcgtcatctccaaggatcgcgccatgagcgcgttgaaaccccatatcggacgcggcaccgacgtgctgaccgacggtgcgcccgcctacgtgaaaccgctggccgaactgggcgcgaacctcacgcaagcctccgccgacggtcacgcgatcaacagggtgaacacgctgcatgcccgtttggaggatttcatgttcggcttccacggcgtgtccacgaagtacctgcaagcctacttggactggttccaatggctcggcgcgttcaccggcggattcggcgagaccgacgacgaccggctgcttgcccgccagctcggcaacggcctgtaccgaatccgccgtcgcgactaccagcgtatggcaccaccgtacatggactactggcaaaaatccgcatgacatcgtgcatacgatgtacagtcgaaacaaccagacaaataggaggcgcgtatggcgagcataccaaccacgaccatgaggatagacccccagctcaaagaggaatccagccgggtgttggaagacctcggacttaccctctccggagcggtcacgatcttcctcaaggccgtcgtcagggaacagggactcccgttcgaagtcaagaaggaaacatcgaatggcagataaggtcatccgcatcaaggaccaccgtccgcaggatgcgaaaggccatcgatacacgctgcatcgcggaaacgtgcttgacgtgtactcggattgggaagcccctgatctgatcgtcagcgatggagcctatggcgtgcgaggattccgaggtgataccgtgagtgcagatggactcgtggactggtatgcgccccatgtggcccaatggtcgaaacgggcgaaaccttcgacctcgctgtggttctggaacaccgaggtcggctgggccacggtgcatccgctgttggaggcgaacggttgggaatacgtgcaactggtcacttgggacaaggggctgtcgcatatcgcaggcaacgtgaacggcaacaccattcgacaattccccgtggtcaccgaggtctccgccctgtaccgtcgcaggctgacgcttcccacagaggatggcggagttctcggagtgcagcaatggctacgtgccgaatggcggcgttccggcctgccgctctgccgtgcgaacgaggcatgcggtgtgaaaaacgcggccactcgcaagtacctcaccgccgactggctatggtattggccgcccggggaaatggtcgaacgcatggccgaatacacaaagaacaacggcaagcccaccagccgtccttacttctccatcgacgggcataccgaaatcacggccgaacaatgggactccctccgtgccgtatggaaccatgtcaacggactcactaatgtgtggtcacgcccaccgcttcacgacggagaacgcctcaaggggaccctgcaacgcagcgcgccacgagtctacaaaccctccaaacaatcagcggcgcatctcaaccagaagcctctggatttcatggaccgtcagattcacgccgcatccaatgagggggatgtggtctgggagccattcggcgggctggcgtccgcatccgtcgctgccgtgctcaccggtcgcatcgcctatacggcggaaatcgacgaggaattccagaacctggcccttggacgattggcggaggccgaagaggagtatgacacgaaaaacgcaaatgacacgatgaccctcgaaagaaggcaggcatgaccgattacgacggcaaggaccgacctgaacactacgagcttcccgacggggacgaacggaccgaactccgcaacggcatagtccgagcattgtatgcccttccgatgcacttcacatcgcccatcaacgtcgaaggcatcgaggtcaatgacctattctcaatcaatacactgctcggcggcaccatcgaggcccagaccgtcatgctgttgaactccctgcgcagcatatgggacccgcaaggcaaatgggcggacaaagaattccgacgctatcccgaatccttcccggacgtaaggcttgtaggctccaacaacaaggacgattcgccgctcatcggcatcgaactgaaagggtggtatctgctttccaaggaatccgagccatctctacgatacaaggcatcagccgacgcagtgactgaatgggacttgatctgctgtgttccttggggattgtccaacgttctcagcggcaagcccgtggtctacgagccctacgtcgaacaggcgaaattcgcctccgacatgcgcacttactactggaatcatcgcagaggagacaactccaaacgagactgtggcatccatcatccggaaaccaccccgtatcccaaaccgggaacgcaatatgttgatgttcccaatcaagacggaggaggcaactttgggcgtatcgccagagtggatggtctcatggcggattgggtgaacgaatccatggacacgctcatggcgggtatcgaagcgaagtactgggtgtcgttcttcaagctattctcagaaggcaggccaaaagaggaaatcgaagcggaattgagcaacatcgctcgcaaggtgcgtcaggctggccggcccgaccacaaggcgtccatgctggaagagcagctactcgcacatttgagcgccatcgtcgatctgtccctgaagtagactgacatttacccgcttgtttgacttttcagcacagttaaacaagcgggtttctgtcatatatcctcttaggtcaaccttggtctaacagagccatcttttttgcaaacctctattgagatttcatgttgcaatgtcagcaatatcgaatgatattaaaagatactgcaacagcgattgacaacgccctttagcgctggatcgcgatgtgtgagatgccaggttccgcagaattcgcaccgatacacccatagttcagtgccgcgttcacgccaactctggtcggcggcctgccgggccgtcgctttgtcgcgatacatgattttgttcgattcgacgcagcgtttgggtacgaaataatgcatagttccccagtctattccaccatcggataagggcaggaagctcccctgaaattcctgggatcccccagcgtcccgggactcccagtgactggagcgatccgcccgccaccaggcctcccggcgtcccgaaacctccaatgggcggaggaaacacccgtgtgcgggaataagaaaaggggttcccggagcgtcacgcccggggatcccccggaaaccggaagacaaacaaaaaaagggggttcccggagcgtcacgctcgacgggaaccccgacgttgaatgcggcggcgtgctactctcccacaccctctcgagtgcagtaccatcgccgcgaccaggccttagcttccgggttcggaaagggaccgggcgtctcacctgggccatgaccaccgcaaaaccaatataacggccaacccccaaccgggatcggccggcaacggaaccagccacacgaccgattccggtcgtggcggtccgggaaccggacaacggacgcgaacaaccaaacgcttcaccggtatcgtttccgtgaccacaagaaacaatgctccttgccatccaacgaaagaaaccaccacaggacgagacccgacccaacaagcgggtcggaaagagtgtgccgcgttcgcccgttagtaccggtcggctccacccctcgcgggacttccacctccggcctatcgaacacgtgttcaacatgcgggctacaggcgctccggggagcgtcaaggaatcctaatcttggagcaggcttcccgcttagatgctttcagcggttatccctcccgaacgtagccaaccggccatgccgctggcgcgacaaccggcataccagaggtccgtccacccaggtcctctcgtactatgggcaggcctcctcaggattccaacgagcgcagaggatagagaccaaactgtctcacgacgttctgaacccagctcgcgtgccgctttaatcggcgaacagccgaacccttgggacctgctccagccccaggatgcgacgagccgacatcgaggtgccaaaccatcccgtcgatatggactcttgggaatgatcagcctgttatccccggggtaccttttatccgttgagcgatgccgcgcccgtgcgccggcaccggatcactatctccgactttcgtccctgcccgaaccgtcgttctcgcagtcaagcccgcttgtgcgattacactcgaaacccgattgccaaccgggctgagcggacctttgagcgcctccgttactctttgggaggcaaccgccccagttaaactacccgccaggcactgtccctgaacaggatgactgttcgaggtgagacgtcaaacgagaacagagcggtatttcaccttgcggctccacacgggctggcgcccatgcttcgaagcctcccgcctatgctacacaatccgcgcctaacgccaataccaaggtatagtaaaggtcccggggtcttttcgtccttctgcgcttaacgagcatctttactcgtactgcaatttcgccgagctcctggtcgagacagtggggaagtcgttacgccattcgtgcaggtcggaacttacccgacaaggaatttcgctaccttaggatggttatagttaccaccgccgtttaccggggcttgaattcaccgcttcaccccaaaaggggctgacggatcctcttaaccttccggcaccgggcaggcgtcagtgcatatacagcggcttgcgccttcgcatgcacctgtgtttttggtaaacagtcgctaccccctggtctgtgccacccccaaacgctccgagggcaagcctcttcacgcccgggggtctcccttataccgaaggcacgggagtgatttgccgagttccttgaccaggattcgctcgatcgccttggtattctctacctgaccaccagtgtcggtttggggtacgggcggcgacgcccctcgcgccgaggcttttctcgacggcctggaccaccggatatcgcgccaaaaagacgcccatcatcacacctcaccctacatgccccacggatttgcctatgggacgggctgcgtgcttgaccacggaaaaccacctccgcggccggctcccattccgtgtcacccctgtgcgctagcctaccaggactacgctcccaacgaccgcggacaccgaaccccgaagggaacgacgccacgcgaccggaggttagtactcatccgttcggctcttacggtacgccgccggtacgggaatatccacccgttcatccattcgactacgcctgtcggcctcgccttaggacccgactcacccggggacgacgaacgtggccccggaacccttggtcatccagcggacgggatcctcacccgtctctcgctactcatgtctgcattctcactcccgcgcggtccacggcacggttccccggccgcttcgccccacgcgggacgctctcctacccaacggccatacgaccgctgccgcgtcttcggtggtgtgcttgagccccgctacattgtcggcgcggaaccactagaccagtgagctgttacgcactctttcaaggatggctgcttctgagccaacctcctggctgtctatgcgactccacatcctttcccacttagcacacgcttcgggaccttagacgacgatctgggctgtctccctctcgacgacggagcttatcccccgccgactcactgccggaatacacatccacggtattcggagtttggctgctattggtaccccatacgggcccgcaagcatccagtagctctacccccgcgatgcaatcaaccgacgctgcacctaaatgcatttcggagagaaccagctatcacggaatttgattggcctttcacccctagccccaggtcatccccccggttttcaacccaggtgggttcggtcctccacgcggtcttacccgcgcttcaacctgcccagggctagatcatcccgcttcgggtccagggcgcgcgactcaaaacgccttttgagactcgccttcgctacggctcccccaccacgggttagcctcgccacgcaccactgactcgcagactcatttttcgataggcacgccgtcaccccacagggaggctccgacggattgtaggcgcacggtttcaggaactctttcactcccctcccggggtgcttttcacctttccctcacggtactggtacgctatcggtcagacaggtatgcttagacttaccccacggtcggggccgattcacacgggattccacgaggcccgcgctacttgggacacatgatcggaagacggcaagcttccaggtacggggctggcaccctctgcggccaggccttcaagcctgttcccctggcaagccgttttatgactcccgcccggtccgtcggaaccgggacacacgctcccgcaacaccacgaacgcaacccccgacgggtatcacgcgcccatggtttggtctgatccgctttcgctcgccactactcacggagtatcccttcctgcaggtactgagatgtttcacttccctgcgtacccccggaacaacaaggttccgtgccggcccatgacggccggcgggttgccccattcggaaatcctcggatcgaagccatgttggaggctccccgaggcttatcgcatcctcaaacgtccttcatcggtactgtctgccaaggcatccaccatacgcccttcagggcggcacacgccccgaaaaaccctaatgatagcttcaaacgccagacgacaaatcatcacactgtaaaaaatgatcacaaaacgatcgatctcgaaaccagactccaaaaaagaagcctggcgaaatcgcgataaagcaagcaggacaaacaatcctgcattgctcgcgtccactatccagttctcaaaccaccacgcgccccgaccggacccgacccacaggcccacaggcccacggcgtcccgccaggggcatccggaaaaccgcacgcgaccacaacggtcgcgggtggcggtccgggaacccaaaagcatatccgcaccactccccgccggccccaaggacccgcgaagccaacgatctcttccacaccagcacgcccgcgccaaaccggagacgatccccggcacgcgggccacacgacggacgccagaccggcgtcctgaaaaactccgtagaaaggaggtgatccagccgcaccttccggtacggctaccttgttacgacttagtcccaatcacgagtctcaccttagacggctccatccacaaagggttaggccaccggcttcgggtgctacccactttcatgacttgacgggcggtgtgtacaaggcccgggaacgcattcaccgcggcgttgctgatccgcgattactagcgactccgccttcatggagtcgggttgcagactccaatccgaactgagaccggttttcagggatccgctccacgtcgccgtgtcgcatcccgttgtaccggccattgtagcatgcgtgaagccctggacgtaaggggcatgatgatctgacgtcatccccaccttcctccgagttgaccccggcggtcccccgtgagttcccaccatgacgtgctggcaacacagggcgagggttgcgctcgttgcgggacttaacccaacatctcacgacacgagctgacgacgaccatgcaccacctgtgaacccgccccgaagggaaacgacatctctgccgcggtcgggaacatgtcaagcccaggtaaggttcttcgcgttgcatcgaattaatccgcatgctccgccgcttgtgcgggcccccgtcaatttctttgagttttagccttgcggccgtactccccaggcgggatgcttaacgcgttagctccgacacggaacccgtggaacgggccccacatccagcatccaccgtttacggcgtggactaccagggtatctaatcctgttcgctccccacgctttcgctcctcagcgtcagtaacggcccagagacctgccttcgccattggtgttcttcccgatatctacacattccaccgttacaccgggaattccagtctcccctaccgcactccagcccgcccgtacccggcgcagatccaccgttaagcgatggactttcacaccggacgcgacgaaccgcctacgagccctttacgcccaataattccggataacgcttgcaccctacgtattaccgcggctgctggcacgtagttagccggtgcttattcgaaaggtacactcacccgaaggcttgctcccgatcaaaagcggtttacaacccgaaggccgtcatcccgcacgcggcgtcgctgcatcaggcttgcgcccattgtgcaatattccccactgctgcctcccgtaggagtctgggccgtatctcagtcccaatgtggccggtcgccctctcaggccggctacccgtcgtaggctcggtgggccgttaccccgccgactacctgataggacgcgaccccatcccataccgatgaaatctttcccgacaccccatgcgaggagtcggagcatccggcattaccacccgtttccaggagctattccggtgtatggggcaggtcggtcacgcattactcacccgttcgccactctcaccaccaagcaagcttgatggatcccgttcgacttgcatgtgttaagcacgccgccagcgttcatcctgagccagaatcgaaccctccacaaaaaaactttgcagaaagccaacatgtgactctcaaaaataagaaaattgacgatcgccttataaggaaaggcgcatcgcacgaaaaccccaccgtccttcaaggcctcccggccactcgcgaacgagcggacgatgaactggcaatcattgactataaagaagtagtacaaatacgctcttgagttctcaaaccaccaccactcacccgcctcgaggcaccccaaccggggaaccactcgccgagcggcagcgaagagtcaatttacacgaaccccggcgatcacgcaaatcgacccttccaaagataccctagaaccgttgcaaataaacacatccctcggcgtgtcgaaaaaggcctccgaacggccgtacagccagtctagaccccgaagacaacgcctacatgaaccaaaaacaaactataaacggcgtgtcatacccatatacatctcattcccatgtgatgaatacccaaatgcaatcgcaaatcatgattccagcggaacagaaagaacagaaatacaaaagagacgcgaagaagcatgaaacctggctgcacttgcgacggcacgcacgctgaaatacaacaagagccgccgactcagggaagtcgacggctctcgctgtttcaattgttattcagttatgttttgacctgtgagaaggaagtgagatcaggcagtgacctcagccttggccttcttgcgatccatgtagcgcttgatagccagagcctcaagtgcgatcaccaggattgcggtcacgccccaagccacgtacatggcggtcttccagatcggggtggcgaccttcggctcaccgtctgcatactgccagctgttggcggcggtgtacagaatattgtgggcggcggtacgcatggccttcacggaggttgcggacttgtcggtgatgtggttggtgatggaggtggtagccagcatggaatcgttgccgttacggatctcctgatcaccgttctggtagccgtagccgccgaaataatcggtcaggacgaagcccttgaagccccactcgtcacggagcacggtgttcagcagaacgttgttgccaccggcataggtgttgccgatgtagttgaaggcgctcatcacggcctgtgcgccgccttccttcacgctcatctcgaacggcttgaggtagatctcacgcatggcctgctcgttggtccaggtgcagagcatctcagtacgcttggtttcctgatcgttcagcgcgaagtgcttcatgaaggagtacacgcccttctccttggcgccggcgatctcgttggatgccatgacgccggagagcagggaatcctcggagaagtactcgaaagtacggccggagaatgcgttgcggtggatgttcatagccggagcgtaccaaccagcaacatgcatgtcgtgagccatatcgccgatcatctcgccgaactgcttggccagatccttgttccaagtgcaagcgaatgcggtggaagccgggaagccgatggagccaacaccagtgaagttgttgttcaacgaggccgggccgtcagcgtcggtgagctggatcttgccgacggaggagacggccggagtgccgtagccgccgttggcaatgaggttgtccatatcgtcgaaggtcagctcgtcaagcagcttctcccaatcagcatcgtcgtaatccttgccgtacatgtcggccaggcggaggccattcttggcaccggtggtcggcatctcgtcggaatcgtcgttgaactgagacggatcgtagttggtgttgttgtagaaggtttcctttgccttatcagacatttcgaagttggtcggagcggcggtggcttccttgtagtttgcgaaatgtcctgcacggctcaggtaggtcacatcgcctgcagcatcatcgaactggttggtggccacggtctggtcgccattgtgggtgttcgaatcggagtcgtaggtgatggtgtcgtccacggtgatcttcttggagccgatcacagtgtgggagtcggagttgatggagatgttgtaatcgcccttttcgagcacgtatgccttggcattcttgtaatcataggaagccatgtcatcgtcttcgaattcgacggtcacgtcctcggaagcgcccggctcaagcttctcggtcttctcgaagccaaccaggttggcactggccttttcgatgccaccttcggtgtacggcgggttgtagtagacctcaacaacatccttgccagcggtgtcgccggtgttggtgacggtcacatcaacggtgaccttgccatccttgtacgtcacatcgttgagcttctgctcgaaggtggtgtagctcagaccgtaaccgaacgggaatgcaaccatggaatcgtaatcgatggcaccttcggccgctgcggtctcatagaacttgtagcccacatagatgccttcggagtagttcacaaagcccgggatggcggtgacttcgtcaccagtgaagcccgtgtacttggcggccttgtcttccatgttggtgtattcgaacttgccgaagttgttgtaagacaccgactgggtgagatccttcaggaaggtgtcggaagtcttgccggacgggttggtatcgccggcaagcacgtcaccgagtgcggagaagccggtctggcctgcaggcgggcaccacacgacggatttgatctgcggatagtcgttcaggaagtcgaactggaaggtgttggcgccgttgtagacgagcgtgaccttgttgaagttcttggtgaccaggtcgagcatatcgcgctcggtctggctcagctgcaggaagctttcgccgtccttgaagtcctcgtaatccttggagttgttctcataggtgatgccttcggccttcatgttcatcggaaggtcagcgccctcgccaccgacgcgggtgagcactacaacagcctcatcggagaagctcttggcatcggagatcagggaatcggaatactggtcggccggaacctcaggcagggtccaatcctgtgcccacatgccaacaactgggcgatctgcacggtaatcggtgtacagcttggtcaggtcggcgttggtctcgatgccggcttccttcatgccatcaagcagggaaacggtgtcatactggtcggacatggagccggagccggtgccgccgtataccgggttggtggagccccaaccgaacacgttgaccttcttgttagccagcggcaggttggaatcatcgttcttcagcatggtgatggcttccgactgcacttccttggccagctcgttggccttggaaacagtggtgtcagacagcatgtacttggtgatggtcgcgttgttgagcagcgtcgacagcggaccggacagcatcatggaaaccgcgacgacaatgccgaccaaagccacaagccaagactcggagtggatgatcttacgggtcgccacttccttcaccgtcttcttgttgacggcaaaagtaatgatcagcgcgagcacaaatagcacgccaatcgcaatcaggtacggcgtcaacgaaccgataacgttcatgacgtcagccatgttgatttgcagcatggtctgcctcctccttgattctcataaccaaacgacatgcaggctccgatttcctcatcgaaaccagaaatcatgcaacgctgccccgcgtcacgcaatttccagaagtgaagacacttcttcatgtcgatgtttcgatttcaccaaaatccgcgaaaaaagcaccctgatttttcccagcctgtcgtttcgcgtgcataatctgcataccacctgcgcatgtaaaactaccattcgtgcacatataatcccgttgcgcgcatgcatctggcacaatgtgcgctcatccgcagattgttgcaacatccttgccttgattgcggaaatcatcgatcttcattgcgcttccaactccataatcgcaattcctgcgatattttcggcacactacagcgagctgttccagcggcaacttacgtaaggcaagtaccatgggtgccatgagcgacttaagcgcattgaatctggaggcaggcagcctcgttggcggatacacgttgatttcccggcttggatcgggggcgatgggatcggtctggcgcgtgcgcgatgacggcggacaccagtatgcaatgaaaattttgcgcgattcccttgccgaggacgatgcgtccagcgaacgctcccgcgatcagctgaccgcacgcgagcgcctgcgtagggaggctatggcgctgcagaaagtgcgtcatccgggcgtgtgcggcattgtggatatggaattggatgatgctctggccttcattgtgaccgagctgatcgagggcaagaatctacgtgaagatgtgcgcgccaacggccggtatgtgggcgatgatttggaacggttgggacgcaagctgatcgaggcggtgaaggctgtgcatgcggccgggattgtgcaccgcgatatcaaaccgacgaatgtgatggtgtcgaataccggaccggtattggtggatttcggcattgccatgggcgagggcgaaagtcatgtgactcgtaccggattggtgatgggcacgcctggattcatcgcgccggaaatcatcgacggtgccgaatccgatgagatgagcgattggtggtcggtggcgagcgtgctggcatttgccgccactggcgagccggtgttcggtacgaaaccgatgatggcggtattggagcgtgctgccgcgggaagcgcgaatttggcgggattgccggctgggaccatggccgcgttccgttcggcgttggatccggatcgtacgaaacgttgcactccagacgagttgttgcaggcgattgcgttggatgcgttgaatccgcaagcttggatttcggggaatacttcggatgccgccgatagtgccgggtcggaggcgatgctcccttttgatggatcgcccgacaatccacgaatgctttggcgggcgttagaccatgtgacgggagaagacgccatcggcacgcgcaccttgccgcaattcgttgaggccacgcaggcaatcggcgcaaccgttattgctgacataaccgataccgttattgccgatgcgcccgatgtcggcacctcggtcatggatatcaacgcgcataccgcaaccattcctcttggcaccggcacgcgcgtgctgcctgtcaatagtggggataccagtgtgctgccgcaagatacaccgcaatccacgcgggtgatgccggtccaggacgcttggaatcccgctcaagaggccgcacagatcgacccggccatcaaacctgcattgcagcgcatcgccaaccagcggcctcctgccgtaataccgaacgcatcggttgaaatggcgcaaagtgcgcagccacaagacatgcaaacatctgccgtgccaaccgcaccggtcactccggccgcgccgctcaacccgaacgtgccgcagagtgtactgcagccgccgaatccggccgacgtgcaacgcggcgaactgctaggcagaggcgtgcccctctgcgtgctgatggcgattcctgtggccgcatgcggcctgttctcgccatggatcgccctgatcgcgggggcgctgctggcctggttgctcgccaccattggattcaatatggaggcgcagctggaacgcgaaggccgccgtgggggcagccgcaggacttccgactggttcgcccgcgccgccacgctgccttggcatgtgctcaaggggctgggttatgcggtgccacgcgcactgatcatggcggtcatcgccgcattaggattgacgattgccacagtcacgctgcaactgccgtttgccatggttgatacgtcgatattcggattcacgattccgctgccgacctggattgaagggccggtttcgcaaagcggcgtcgcccaggccggttgctgcgccatcggctggctggtatgcgccctcgctccgggagcattggtgctgcgattgggtgccggcgcattgcgcggccgcccgaaatccggcaccactgccgaatcgtacgatatgtagtgacgccatctcacgaaatacgcagcgaaaatcaaaaatcggcaaacgtttgcaatcatcagaaaaacatcagataatcgcacgtagtatggcaacgtgagcttttacgaaatacttcattcagcaatagcgtgcccacactactatggtgcacagcatcgtgatgtgaacatcgaaaggaatgtggatggcccagaacagtaaggatgcgcagaagcgcgccagccgcgccgagcgtagggccgctgaggccgcggagatgaaggctcgcgccgaacagatggagaaggagcgcaagcagcagaccctcatcggcgccatcgtgatggcggtgctggtgatcctggtggcgatcggcgcgttcaccgtgtatcacaacatgcacaagaacaccgaaacgcaggcttccacccagaccgtggaagaagcgtacgacaagctgcagcaagtcgaaaacacccctaagctcgtcgataagaagggcggattgctgatttcgaaggatggctacggcaagtccgtcgaaggcgcaccgactgttgcgatctacatggatttcctgtgcccgggctgcggcaatctgcatcgccagcttgatgaggatctgcagaagatggtcgacgcgggtcagatcaatcttgatttgcatttcatggcgtttatggacaagtggtccaccgacgattattcaagccgcgcagcgaatgccgcgatctatctggccgagcatgacagcgatccgagccatctgatcaccttcctcgaaaaaatgtacgccgaggatttccagcctgaggaaagctcgaattacaagtccgtcagcgacgatcagatcaaggaacagatgatcgcctcgggagtttccgaggatgtggcggacaaggcgttcggccgcgactaccaggattggcttgacgccatcgacacctatacgccgaagcgctccgaactgtggaacacgtccggaacctacaaagacagcatgaccaccccaacggtgaccatcaacggcaagttctgggatatgaaccagttgagcactgcgcaggagaccattgaggaaggcctgctggaggccatcggaatcaagtccgacgacatcggcaaggaaggcgtgatgccctccatcggctccgacaaggatccgatctccaacaccactggcgagtgatcagccctacgcaatcctcataatcgaaaaattatacccccctactcgccagcgtgccagccaaagcgcagttccaagttgacggcatcgggcacgctggttatgctattcaatcgttgccgtttttatgcattatgctagaaagcggcacaagcctccttagctcagatggccagagcggccgccttgtaagcggcaggtcgtcggttcgatcccgacaggaggctcgaaacccgttttgacgggctttgacctcttaccatgggtaagtgatccagaagccttcccccaacttatggcttctggcgaccgaacgaggcttcccccaacctgcctcgtccgggcagggggcaggacatccccttctctcctgcccccttttttctttactccttttcctcgaaaatgtggcggtatagataaagccagcggaaaccatgccattcgtcccgatctgaccgttacaatgacggcgatgtaggcagtcgctggaaagaggacgtatgacaagaaggtggaccccccggagattcgtgacgcttcggcgtgttcgagtgacggcatgcgtggtctcgttgacgctcgcctcgacgctcgcattcggcgtaggcgcgcgcaaaaccgtggctctgaccatcgatggcgaaaccaccaccgtaaccacatacgcgatgagcgtcgaccgtctgctgcaggaacgcggcgtgaaggtcaaaacgcatgatctcgtggaatccaccagccccaccagcatgctgagcaaccatgacgtggtgacggtacgaagcgcctaccagaccaccatcaccatcaacgggcaggaagtgcccttctggacagtggcgaccagcgccgaacagctgatcggattcttcgaacaaaacgaagcagacgcggcaaaagtcaccgtcaatatcgacaacgtgtacaacaaactcaccggcggactgatcatcaaccaaaacgggccggtcaccgtcatcgcagacgggcaaagctccgaatcgccgaatggcaaactgccggcggcctccattcttgactccaaaggcatcacgctgaacaaggaggatcgcgtcagcgtcgaaaaggacaacggcgaaacgatcctgcgcgtccgccgcgtgacgcacggcgaggaaacacgcacgaaagcggtgcctttcggcacgcaaaccatcgtcgatcccagcctgcagcccggcgaagtcgtagtcaggcaggaaggcgaggacggcgaaatccagcaaacgtacgacgtcacgtatgtggacggcgagaaggaaagcgagacgctgaccaacgaaacgaccacgaaaatcgccctcgatcagattatcgcagtaggaccggcagcatcttccgacgattcgggatcggatgacggatccggcaattccggagataccggcaattccgataattccggaaagaacgacaattcgaacaagaacaacaattccgataattccgacaagaaagacgattcgaacagtaattccggcaatacggataattcagacgacaacaagaaggacgattccggatcgaaaacggacccggatccgacgccaactccagacccgacccccacgccaactcctgacccgacccccacgccggatccgacgcccaccccgacaccgcaaccttccgatccttcggcaggatgccgcctctatcacccctcccccgcgcaggcacaggcctacgcggccggagccgcggcgcaatatggctggaccgggcaaaactggaccgatctggtgaaactgtggacgcgtgaatcgagctggctgtggtatgcggaaaacgcatcttccggagcctacggcatcccgcagtcgcttcctggcagcaaaatggcggcattcggcgcaaactggcgtgacgatgcggccgtgcagatcgactggggcctgagctacatcgcgcaacgctacggcagcccgtcgaaggcatgggagcattccgagcaggtcggatggtattaaacaacgccgatcgcaacaatacgcaaacgcaacagcgcacacttttcataccagttgaacggataatgaggtaatgacagaacacgcgaacgaaaccaacgcaaccgacgaaaccgcgcaaggccgcctgttgggggctgccgacattcggcgtatcgcggccgaggccggtatcagcccgacgaaaaaattcgggcagaatttcgtaatcgacccgggcacggttcgtcgtatcgtgcgcgaggcaggtgtgaccgccgacgatcatgtgctggaagtcggacctggactcggttcactgacattggcgattttggaaaccggcgccacgatgaccgccgtggagatcgacccgcccgttgcggaacgactgcccggcaccatcgccgaattcatgccggatgcggtggatcgtttccgcgtggtcaatcgcgatgcgttgaccgtgacgccggaaaatctgcctgatttccaaaatgatgattcatttacactggtcgccaatctgccatacaacgtggccacgccgattctgctgaccttgctggaacgtttcgacaatctcggcacgttcctcgtgatggtgcagaaggaagtcgcggaccgactgagcgaaaagcccggttcaaagatctacggcactccaagcgtgaagctcgcttggtatggtaccgcggaacgtgtgggcattatcgggcgcaatgtgttctggccggcaccgaatgtggattccgcgctggtgctgttcaaacgatatgagggcgggcacacgccttcggccaacaatcccgacggttccgtagtggaccgcgaaaacgtgttccgtcttatcgacgccgcattcggccagaggcgcaaaaccctgcatgccgcgttgaagaagatcgtgccctccgaagcgttcgagcaggcgggcatcgatccgacgcgccgtggcgaaacgcttgccatcgacgaattcgtggcattggcacgagccgtgggcgaggtgtcgcaagcatgagcgacaccaacaccgcaatcaacacggtcagcgtggactgcccggcgaaaacgaatctgaccctgcacgtaggcaggccacgcagcgaatggggtggccgacacgagctcgacaccatctactgcgccgtcggcgtgtacgacaccgtcaccaccagtcgcaaaaagcccggatccggtttctccctgaatcttgaaggtgcctatcttggcgatctggcctcctccggcagcgacatgcgacgcaaccatgccgtgctcgccctgttcgccatggccgaagcgagcggccatgaaccggatgtggcgttgaacatcgaaaaacgcattcccgttggcgcgggcatggcaggaggttccgcggatgcggccgccacgattctggcattgaacacgctatggaatcttgattggtccattgaacggttgcaacaggttgccgccacattgggcgcggatatgccgttctgcctgaccggaggctatgcgcgaggcaccggcttcggcgagcagatcgaacaactcagcgaaaacagcgacgccgtgctggaactgacggatcagggctttgcaggccgtctgctggtcggcgcgtatcaggcggaactgcgcacgccggaagtgtatgccatgttcgaccaaatcggcgccggcgcaaccgacaacaatcatctgcaacaggcgtcgatctcactgcatccacgcagcggacaggcgatcgacgaagcgttgcaggcaggcgccaagcaggcgttcgtctccggatccggcccttccgtaatcgcattcgtgccaaccgacgatgcggcacgcgccgtgcagtcggcatggcaacaaagccgttgcgtcgaccgcatcatcgccaccaaggcaccggcccatccgattgtgcatatcatcgcgtaacagtaaggttgaagtcaaccgatttttggagaaggactcgtacatgactcaggctaacgacgagcgcgccgcgcgcaaacagtacattcgccgccgtcaaaaggtggtgttcaccatcaccggcaccattttgacgatcgcattggtgatttccctgctgttcttcttccatgttggaggattgggcaatgtcaagtcggccgcggtacagccgaattacggccagcaggccccttgcgcagcacaggaacaggacggcagcaaaggcaagtacgtggaaaaccgcaacatcaccgtgcgcgtgctcaacggcactgaattcgccggcttcgcgcaagccgtcagcagcgcgttgcagaaccgcgagttcaacacccaggcagccggcaactacaccagctccaaagtggaacgcacgatgatcatcttcggcaagaacgccatcaatcaggcgtacacggtgaacagcaacttcaccgacgcggcgatggtgatggacgatcgtgaggatatgctgatcgacgttgtggttggcgcgactttcgacaatctgcagaatcagaagaaggtgccgaccgccggcaaggagatcgacagcttcgagggatgtgttaccgtcgacaagatgaccgacgtacagaaggcccccgaacacgacgccgtgtgatttgcagattttttgatttgcagattttcggattgacctcacgatttcgatttttcactgaaaatcaagatcgtgaggtcaattcttatattcgtgggttaaatcgcgggcgaaatcctccagagaatacccccgaaaccgcacttttcggaaccgactgacctcacgattctatttttgcccgaaaaatcgaatcgtgcggtcatagaatccaaatcgtgaggtcagcaagcagactactcggcctgctgttcctcataccaacggttcaactcggcaacagcgacatcacgctcgaccgggccgttatcgaggcgatattccagcatgtgcttgtacgccttgccaaccagcggccccgggtcaatgccgagcagctgcatgatttcgtcaccgttcagatcagggcggatcgcgtcgaaatcctccttctccttcagatcgcgcacgcgctgttccatctcgtccatcgccgacgagaacaccatggccttgcgcttgttctgcgtggtcgcgtcggcacgcgtaaggcggttcaggcgctcatacagcggacccgcatccttgacgtaacggcggaccgcggaatccgtccacggctcctccacgtagccgtggaagcgcaagtgcagattgaccagctcgctgacgtcctcgaccatatgatggtcgaaatgcaatgccttaaggcgcttgcgggtcattttcgcgccgaccgcatcatgatgatggaagctcaccttgccacccgattcgaaacgacgcgtcttcggcttgccgatatcgtgcatcagcgcggccaaacgcaacgtcagatccggtgccggcacagggccgtccgggccggtttcgagggcaaccgcacgatcaatgacgatcatggtgtgctcgaacacgtccttatgacgatgatgttcgtcgatttcgagctgcaatgccggaatttccgggaagacgatatcggcaagaccggaatcgaccagcgcttcgatacctgcgcgcgggcgatcggacagcagcattttgaccagttcgtcgcgtacgcgctcagcggaaacgatttcaatgcgatcgaccatgtcggtcagcgcttcagcggtttccggttcgatacggaagcccagttgcgccacgaaacgtacggcgcgcatcatgcgcagcggatcgtcgtcaaacgactggcgaggatcgaccggcgtgcgcaacacgcccttggccaaatcgttcgcgccgccgaacggatcgacgaattgcaattccggcacacgcaacgccatggcattcaccgtgaaatcacggcgggaaagatcgccttccagcgtgtcgccataattgacttccggcttgcgcgagtcggggtcatacgtgtcggaacggtaggtcgttacctcaacctgcacttccgtgccatcctcacgcctgcgcatggcgcccaacgtgccgaatttacggcccatatcccaaaagccatcgcgcccgaaacggcgcaaaatgtgttcaaactgctcaggacgcgccgatgtgcaaaaatccaaatcatgcgatttacgatgcaacagcaggtctcgaacgggacctcccaccaacgccaattcatagccttccgcggcgaacatacgccctaattcaatggcctctggccacacttcgaagttcacgccatccctttccggcaccacaagtttctgccttaccagcataccgttaccccacctgcacacagaattgagtatggttggaatcatgattacgcccgcagaccttgcacgcatgcttgcccatgctgcggacgaccatgcccaaaatccgatggaaccggacaaactgctgtacacatcgcagtccgtttccttgcggcaagagaccatcatcacgcccaacgcacccaccccggcaataatgccgcagcggcgcgccacggacggtccgaccacgttcgcctcgctcgacgcgcaggaactgccggtagtgcgcgaatattcggcgggaggtctcgtattcgacgacaagggccgtgtggcgatcatcgcacgccactcgcgtagcggacatttggaatggtgcctgccgaaaggtcatatcgaaaaaggcgaaacaccgcagcaaaccgccgttcgcgaagttcacgaggaaacaggaatcctaggtgaagtggtcgattccatcgccaccatcgactactggttcaccggaaccagccagcgcgtgcacaagctggtgcatcatttcgcattgcgtcagatcggcggcgagttgacggtggaaggcgacccggatcatgaggcggaagacgcgatttgggtggattttgctgatttggacgacgttctcagctacccgaacgaacgaaagatagcatggttgtacgcaaggaaactcaacagacaggcgtgaaggtgaatcaacccgcacaacggaacgttccgcacggcatgcgtgcgctttcggcaatcctcgccatggttatgaccatggcgttgatgttgttatacgcacctgtgccgaaagccgaagccgaagaaacacaggaatcgcaatccggcaccatgctgtcgatcgactcctccaccgccgtgctgaccgacacttccggctatcatttgagcgcgacggtgaccaacaccaccgatcaggaaatcccttcaggcacgctcacccttgccatgaacgccttctacacgttcgtgtcgcgcaacgatatccaagaatggtcggaaggcatcgggcagattcccacgcccaatatcgttgggcagagcgaggttcccgcgcttcaaccgggagcttcggcgaacgtgcacatcgacgcggactcgaatcaggagacgctggcgtccgtcaactcctgggggccgaaaccggtcacgctcagttatgaggccaatggcgttcaacaagacgaagcgcacactttcgcaacacggaccggagctggaatcaatacccccgacacgcccgcgatgaatatcaccatcgtgcagccgctcgaagcgcaaggatggaccaccgacaacaccatgctggaacagctcgtcaacaaaggtggcgtcacctccgcggaactctcgaaaatcgccgttcccggcaaagaagacgaggcacgactcaagtcgctggaacagacgttcaccaagcatgacaaactgcaggtggtggccgatccaacctatctgaaggcgatgccgatgccgacgcaagtcgacggcatcacgcaaccggccctgttcgacatcaccgcctattccgcgctgaacgacagcaaaacctatgattcggcaggcgtcggcacctcgcaatggaacgccgaacaggccttgaaaaactatcaatcggcgttgggtgacccgaacgcgagtatgaccacgtatgcatggcagggcaccggcaattggaccgccgacgcgctggcgaaagccaagcagcaggggtacgacaccgtcatcgccacgcatgatttcgaagaggatgatgcggccaccgcggaaaccggcaagaccgtagtaaccaccgacgccggcgacatcaccgtactgaccgcgcaaagcgtgctttccaaccttgcacaaggcaaggcgaccagtgccgacgccgaagtggacggcgagggcacaacggccgggcgtctcgcgcgattcgtcgcgcaaagcgcgttctaccagatggagcagccgtattcggaacgcaatctgctggtctgcctgaacggcaactctgatccggccgtcgtggacgcactgatgacggacgtcgaacaatcgccatggctgaacatcaccgatctgaacacgctcaacaacgccgaccccgccttgagcggcgacgatgcagccgcgatcgtgccgcaatccgacggaatcaatgatgcgacgcaagccaatctcaggcagacgctcaacacactggcagcctcgacaaacgacatcaaacgattcaacgcatccatcctcaccgacgtcgccgacgatgccaagcaggcccccgcaggcctcaaagcgtggcgcaggcagctcgtcaacgcgcacggcatcatggccctgcacgcgctaggcggcgaaaatccagccggaagcaccatggtggaaggagccgggcaactggcgtccctgctcatcaacggcgtggccatcacaccgacggaaaacgtcaacgtggtcagcgaaaccgcgcaaatgcccgttaccatcagcaacagccacccctatccggtcacggtaaaagtctcatcattgaccaactccatgcagatcgtcacttcgcgtttcgacaccgtggaagtgcccgcgcacggcgaagcccaagtggcgttcattatccgcgtagccacctccggcatcgcggacgccacgctcagcctgcaggacaggcagggcatcacattcggagcgacacaaaccacccacatcaccagcgcattgcagatcagcgacaaaaccggcttcatcatcatcggcatcgccgtgctgcttggagctttgggactgtggcgccaattccaccgtaagaaggatccagacgaatgagttcttccgttggccgtaattcactgatcatggcctccggcaccgcggcctcgcgcgtgaccgggcaaatccgtaccattctgctcgcttgggctttaggcaccaccggctatgcggcgaacgcctaccaagccggatccatgattccgcaggtgatctacaccttggtttccggcggtattttcaacgccgtgctcgtgccgcagatcgtacgcacgttgaaggcaaaagacgccgaaaccaaactcaacaagctcatcacgcttgccatcaccatgctgttggcggtgacgatcctgatggccctatgcacgccgctgctcaccaagctgtatgtgaacggtagccccgaaaccatggcgttggcgacctcattcaccctgtggtgcatgccgcagatcttcttctacggcctatatacggtggtcggccagattctcgcggccaaagaccatttcaccgcgtatgcgtggagttccgtgggtgcgaacatcatcagctgcatcggcttcggcacgttcatcgcgctattcggccgtgccaccgagcatccgcttgatttttggaccgccgacaaaatcgccctgaccgcaggcacgtggacgttgggcgtggcattccaggcgctggtactgttcattccactgaccaaaatcggattgaaataccgccccatcttcggccttcgtggcattggattgcgttctatgggaccggtcgcggcttggagtgtcggcattgtcgtaatcgaccagctcgccaatatcgtaatcacgcgtacctccactaacgcgccgatgctcgcgcagcagcagttcggcatcaatccgctcgacgtggccggcaatgcttcataccagaacgcgtacacgatttacatgttgccgtattcgctgattgccgtttcgctggcaaccgcgattttcccgaaaatatcccgtgcggtcgccgatcataatatcgccgaagcgcgcatcgatctcagccaggcgctgcgcaatatgggtgtgatcatgtgctatttcgcggtcgctttcgtggtgatgcccgttccgatcattctcgcgttgctgccgtctgtgagcgtcagagaggcgattcttatggcgggaccgttggtcacgcttggcgtgggacttccgttcgccagcgcgtatctgattatccagcgcacgttctatgccttcgaagacggcaaatcgccgttcattttcatgctgttcgccatgggcattcaagcggtaagcgtgatcatcggcgcgaaactactcccccctaccgaatggacgacaatgatcggcatggtaggagccatgagctacatactgccgatccccatcctgtatgccatgctgcgcaaacgattcgaaaacaatatcgacggtccgcgcatagccatctcgtatctgaaatcgattggcgcggcagtagctaccatgttcatcggcgtgacggtacgtgacagcgtctaccagcttgtcggcgcccaaatcggagcggtggacggtcatatgaactggattcaggcagtggcgtgtgccgcactgctggccatagtggccttcatcgtttacgtaggcatgttgcggctgctacgttccgaggaattcaaggaggcgatcgcactgatttcctcacgtattcccggacttcgcaagccgaccagccccaacgatagactggaacagggcgacgccgaaaacggcgagtgaccataggcagaacaaacgtttacaaaaagttgaaggaacccatgaaacctcagctgggagataccatcagcaatcgctacgtgctcgtttcgccattgcgcgaagaaaccggactgcaggtctggaaggccagcgaccatgtgctcgcacgggattgccagctgtttattgtcagcagcagcaaggcattgcaggaagtcaacgcaaccgcttccatgctggctatttcgcatgattcccacttcacgaaagtgctgcagctccagcatgccggccaggtcgcgatggtggtgacgcagcttgacgaaggcatgaccctcagtgaatatcttgcgctgaacgccaaccagccgttgagctatacagccatgcgctccatcattggcgaagtcatcgaatcattgcatgcgctgcaaaaagacaatctcacgcatttctccatcagcaccgacacggtgcgactgacccgttccggcattcagatcgcagatgctccagtgagcatcatgcttgccgacacttcccgcgcgcaggctttggaaaatcgggaacagcttgcgatccgtcaaatctcagcgctattgtacgctatgctgatccgacgcccgtccacgctgtcgacggatttccgtcttgaagcgctcgcgccgaccacgccgatggaattccgcgtgatctgcaagcgcggtctcgaacttgaagaggacgacggcttccccaccgttccgatggcaaccattgcggaattggaagcgttgcttggcgagtaccaaccgctgtcatcgttgggaagcatggatatcacgttgccttccatggattcggaatgctcaatcgccaatgttccgttactgcagattcttgagaaggatgtgctcccgctgccggatacgctggcagcggctggaagcattccggaaatgacgttcacggctcccgaaccgcataacgatttttccgatggcaaggaggctttggcgaaaagcgtcgcggccaccagtggagcggtgaaatcgttgtggagcagcggccgtgaactgctgagcgaagaagacatcgatggcgtgaccgacaccagcgattctcccttctccttccccatcagggtttccgtaccggccgatggcatgtcatccgacgattcccagttggaaaaaaccggtcgcattccagtgatcggcgcggatggtcaggtcattcagcccggcgaggagtccgcccgtgcgttgaaagcagagcaggaggcgatcgatgccgcgtatgccgccggtcgagccgcggttccgccgagcttcacgccgaagaatccttcttccgcttcggcgaatactgacgttgccgacgcgaaactgtttggcaagctgaaaacgaaggtcgttgcgattatcgttgcggtcatcgttgttgcggttgcgcttgggtttgcagttcatggtttgatgcagccttcagattcggttacgactgattcaaaaggaccatggccggaaataaatcttgacgaagtgccgttcggcgaaggagatcagtcggatgcgaattccgcggattcttccaattccgatacgtccggcaataccgattcgtccaattccaaggattcttccgatgcttccgccaatacgccggcatccggcgagtctacggcgtccaagcaacccaagaaaaccgaggacaaggtcgtgaccgccgataagcagtcgaagaaagtgccggatccgaagcagccggaaaacacgaccgcgtacgaaatcgacaatcgtcaattcctgtcgaatcctgacggacagcagggctacggatattacgtgcatctgagccagccgcagaaggcgtatcgcatggtcatcaaaattcgttcttccggtggtcagggatatattcgcgtgaatgcgacaaacagcccgtcccaaggcgaacaggtggcgcagttcgagtttgacgcttccggcacgaccgacatcaagttcgacaaggccgtggaaacgcaggacatcatgctgtgggtcccacttgatagcctgccgggcaaccagctgtacatcgaaagcattcaagtgttctgatcgtcagcacatcgcaatatccgattacttctgaagattgcgatacgaaaagagcctgccatgcgtcacctcacgtatggcaggctctttgtgtatttatttttggaatatggtcgtagtcgaaaagcgatggaacttggctcaagaatcgacaaccaacttttcgccatttttatcactctgatgtcagaactctaatgtcagattcaggagcgtgctcgcggatgattttatgctgcgcgacggctacccccgtctctacagttccgaaatgccgcttgaactcttcttttcgtcatatctcagcacatatgtcgagcgaaacgtggccggttatctcaatgtgcgaaacgtgaccgctttccacaaattcctgcgtctttgcgctctgagcggcgctttgtggcggctcgcgtggaatcaagttttcaagccaaagacgagcaggtatattccgccgcagactggctgacgcgctgaaacgtctaccccagcattagtctgacccataatctggtttggctgacctcatgattgtgatctggcgacctcacgatttcaatcggggacactcttttccagatcgtgaggtcgccaaaacaaaatcatgaggccagatagaagaaatcgtgcggtcaactgacaaatcatgcggtcgctcacataatcccgtccgcacaacccgcacctaaaaccgattaccagagtcacacggacggaatcgcagctaccgccagcacaccccttactccggccaggattcgaagagggtgaggagcgtttcaacgttggtgtcgctccaactgtcgattctgggaccagcatacgtactgttgtatggctgatcgaacacgaccacatgctgccctgcctcacgcaaagtttcgatattcgccggcgaatcgtcaatatgaatcgtggcctgcatactgtctttcagcccagtaaagcacagactcatgtacggaatgcggttgctgtccagccattgcgcggtgtcggaaacgaccatctgatgctggccggacacgaacagccggtgcgtgacaatgcgaatgtacacgtgctcattcgccaatcgctgcaatgcctgcgcgacccccggaagcggcttcatcgtcgcatacagatgctcacgctccgcggctttgtgcgtttcgatgtaatcgtcgagcgtctcgaacggccatccgtcctcgcgcgtgagattgtaatgcgcggtctgcagcgcacgttccggcacgtcaatgccctgccgctgcaggtaatcgcggatcgcgcccttgtaatccgcgcaaacgccgtccaaatcgagattgagcacgcgatatccctgcacgcccacgcgctggctctcatattgttcaggaatagtcgccatatcacgttcctttcttatgcccgacaccaatcagcctgtcgaacagccacaccaatcagcccagcccaatcagcccgatatcaatcaatgtaacctgacattcgccggcaacaagcgcaaatactcccgcaaataaggaagatagaaaatggatagaacaatgccgaccttgcgaaaagtcttacgggagaacgattttgagactttcatagaaaagatagaaaagatagaaaatctgaagatcgcgccgtttcttttgcgacggcaatactgccctgcaatcgacgattgatgttcatcacagcatcgttacgtttatttcaagattagccgatgaaaatacaaaagaatcgacgatcgttgcatgacatcgacggttgagcctgcctatgatgaaggcacaacagaacaaagagacacgatgcggcaggaaccggagagaaaaccggagccgcaccccacacgcggggaaacggcaacgccacccgcgctgaacgtaaccaaaaagcaacagacttacggcagcggccagaggaaagaacagaaaacaagaacgccgccaagccgaacgaaaggaaacatcatgaagaacaacactttcaaccagatcatcaacgccaacctcgcttccgtcgatccgggcttcggccagttcgcactcgccaaggccagcgccgatctgttcaagaaggtcatcaacaagtgatccaaggcccgcgcaggcaggcgtcacgatttgcaaccaaagggcttgcgttccgcatgggacgcaagcccttttcgtgcgttccgctcaaacaccgccaagaattcgaccgccacgcatgcagccgccgccaccagcaactgcacacgcaaccacacatgcaaccacacacaacagcttgtgtttcacgtgaaacacaagccactttcacgcgcaacggaaaagccacaacgacacaacggcaatcacaacgtaactgaacgcggcacaatcttcggcgcaaccacatcacaatcgcagcagtcacgtcagtatggcagcaagcaccacaagccaatatcagccagcctgcccccttacgcaatcaaaaagctctctctcacccgcatcaagatgggcgaacagcgccttcttcgcttgcctgtaatccttcgcgaccagcaattgagcgatattgacatgctcctgcccggaaaccatatcctcccggggatcctcgatttgagccaaagccaagctgagcttgcgaagcaaacccttgtactggtcggtcaccaacgaggaaccgatacaggcgacaatggccgtatggcaccgccattccgcctcaaccacgtcataggcgttcccgtgattcaacatctcgcataacgacgtggcggaatcggatatttccttcagctgcccttccgtcgcatgcttggcatgattaatgccggacccttcgtaaaatcgcctcgcataatatacgtcgcgaatctcctcttccgtcaacgtgcgaaaacgcaatgtacgagtgcccggatccctggaaagaaaaccatcttcctcaagcctgaccaacgcttcacgcgtcgtgctccgcgatacgttgtaccgcgtcttcacatcctcctccacaaaagccgtaccggccggatactgcccggtaatgagctcatgttgaatcgtggaaaccaattgatcgaccaaagatgtccgtttcaaggacattccctcacccgccatcgctatccccttccaacagccaaagtctcggctctaacgcaaagagcccatgcacacatcaaggctatgaaaacaaacccgacaggcaccaagaatagcaaccccccaccgagattgtccgccacaagcccggcacaataggatcccagcgccaaacctacgcccatagccgtgttcacccaagagaacatctccccttggcgcccttcaggagcaagctgccccgcaatccggtattgcaaggtgcttccgggagaaacgaacacgccaaccaaaaacagcgcgcataccaacttatgtccacccagcggaagcgccagccccaaacatgcaatcccgtaaatcccagtaaacaagaccagttgtttcactgttgccatacgcttcggatggcaatgggtaaacgccactatgccaatgatcgacccaatggaccatatggatatggccacgccgctcaaagacgccatgtcgatctgcgaatagtacagcggcacagcggtttcgatccatccgctgaacgcactggtcgacgcgcaaatcagcagcagcaaaacaatattgatatgcgataacaacgacgattcgcttcgactttcctcagtccgccgcaaagaacgcacttgggtggcatacgagcgcacaggcgcgcatgccgccaacattgcacagccgacagccatcaacgcatacaccacgccaagcgtggcacccgcattgcaaatagccaaaagcacgctggcaatgagtggacctgccacatagagcacgtccactatcagcacttccaggtcataggcaacgggaaccagatcatccgacacggtggaactccacagcgagcgcgtggtgccagccacgggcggactggccacgcccgcaagcaaagccaatccccagaccatcagcaatggagcctgggattgcgtggcaacaaccaagccaatcacgcaagaaaactgcaccacgccaagcgcgacaagcgcgacgggagcccggccacgatcaataagcttgccaagcatcggcgcgcataccgccatcgctccagtcatcaaagccgtggcggttccggccgccgacgccccatactgggcattgaccagcaaaacgatcagcatcacggaagatcccaatggcatgcgggccataacagaagatacgacaagagatggcacatgtcttgtcttgaacagtcctgcatagcctgcagtcatacccgtttcctcctacaccaatcgctcccgtacttgcgatattcctgcaatccttacctgcgatttcttgaattgcgatttctccagttgaaatttctgaattgaaatttcttgaattgcgatttctttagttgaaatctcgcggaatacgcactgtcgaagtctcgtcgtgaatatttttcccgttatatgcaatcgccatatgcgtagtgacgatgaaatcatccagatcgcagcacattttggattccagttttgaagtggccttccatccagggcgttcaaaaccggattgccgaaccgtgttcatggacgccgtcaacggatcatccggattaatacggtaatccgtatgctcgctgccccagaagcgcagtcccgacggcgtaagctggtctccacggccgtctgtggaacgcctatacaccacttcaccggtttcctcatccacgaatctgcggcaatatggatgcgtttcacgaagttgtttcacgcttggcgccggagcattcaccgccggctcgaaaggtaccttcaactcgcttagaccatccggagccggaggcaggcagagaccgctatgagccatatccaccgttaccggagccataaccgccgagggccagatccaaatccaatagctagtggataacgacacgcgcaaccgatgtccggctggaatacgttgggacacgttcttcagcggaatggccacgtcatacgattcaccaggcacacatggctcaggaaactcgtgcgaattcctatggcacagattgagattcccccgcgtaatcagttcggacgttccgtccggccaaacgtcgcaaagacgggcgaacacgaacccctgccgtccatcaacgcctacgcggagcttcacaaccggctgaccggaaatgaccagatcctcttccaaaggcgcactggtgaagcataggctcctcttgtcatccggggtctgctcctgcggcaaatcaatcggcgatcccattggcagccaagtatccacctgcgttccagtcaccaatgcgctgcgatgtttcacacgagaggcatccacgatttcggtgaagctttccggatcagtggaaggctcgcatgcgagcgcgccgccgaagggcatgatcatggcctcagcatcagcgcctgtatggaacgcgtccgcctgataccaagcaccatctctgtcggtcatgtctggggttgagtgcgccgaatcctgtgtgtagaaacgaatcgttggatcgttctgcgccccgttattgatgcctttgagccatttgtcccaccatcgcacgcatgcctgcaagtagccgatggaagggcctggcacgcctcgttccggccaagtatgcccccacggcccgatgatggcctgattgcacggcgttttgttcaaccccttcatgagtcgaagaatcgcgtccgtgtaggagtcggcccatccgccgaccgccatgaccgcgcattggatggcatcgtaattttcgattacggaaccttgcttccagtaggcgtcacggcgttgatgcgacatccacaattcgctgagattggtgttttcgctcagtcgctcgatgaaacgggatttccacgaatcgcctacgagggcgggatccggcgggcgcacgttgaattcgtgcatgatcgccccccaccaattcatgtagaacgcgagcaaactaccgcccatataatgcacgtcattgtcgtatcgatcatcggtcgagcaggtggtgatgatcgctttaagatgctctggcgtatgcgaggcgacttgcagactgttgaatccactccaggaaatgccggtcatgccaacgtttccattgcaccattgttgggcggcaagccattcgatcacttcgcagatgtcgagttgttcccgtggcgaatattcgtcgtcgagcacgccttcggaatcgccgctgccgcgcaggtcaaggcgaacgcacacgtatcctcgttccgacacgtatccgaatcggaccgcatcgtcgataaggcacacgtcatccttgcggtatggaatggcttccagcacaacaggaaacacttccgccacgccttccatcacgacttccgtcggtcgaggcatccacattttcgcagatagtttttttccgtcgcttaaacggatttcgacgtggtcgagcacgtccacttcatagagtttttgcgtcatgttcgtacctccttcatgcttccttttccgctggcgcaacccacatgttgttgacgttccattcggcgcgaagtcgatctccaacggcaacgcgcgcatcgttggacgaaatgtgggcgaggatttcaacgcttccattggtgagcatcgttctgtaatgggatcccatgaaggtgacattgtcgacggccgcgtcaagaccgactacggcatcgctgccatcagcggttcccgccgtgtgcacccgaatgctttccgggcgaatgaccgcaacgattcgatccccgatcttcatgccgtcaacgccatggcaaacgcatgtgattcccgcttcgggaagatcgacctgatattggccgtccgcttccacgttgacaatcgaaccggcgatgcgcgtggatgcacccaggaactgcgccacgaattcgttcaccggcttgcgatacaaatcttctggagtggcaacctgcagaagcttgcctccgcgcatcacgccgatgcgatccgacatggcaaacgcttcgccttgatcgtgggtcacatatacgaaggtgatgccgacttcgcgatggatctgtcgcaacaccgtttgcatatgctgacgcaatctcaaatccaaagcgcccagcggttcgtcaagcagcagcgctttgggcttcaacaccaacgctcgagccaatgcgacacgttgctgcatgccgccggaaaggctgcccggagacactttctcctgcccgcgcagctccacgagatccagcatttcctcgactcgtgtcttgatttcctgtttgccgattccacgatttttaagaccgtacgcgatattctcggcaacggtcatatgcgggaaaagggcataattctgaaaaacggtatgcacgctgcgcttattggcgggggtatcggtgatttcctcattatcgagggtgatacttccggaagtcggaaattcaagaccggaaagcatgcgcaacgttgttgtttttccgcaaccggacggtcccagcaaagagaaaaactcacctttgttgatctcaagagtaacgtggctgacggcttgtttttctccgaaatcacggcacacatcgtcaagcaggatgcccgcgaccgggcctccgccgatgcgctcatggcctggagtggtaaatccgatattcatgattacttctttcgttgttacgcttgttccgccattcagctgcccttgacggcgctgccggccacttgtttgataccgatgaatttcacgacgatgagcaataccaagaagttgaatacgctcataatcacgccgatggcgttgacttcggcggatacgccctttttgatcatgcccatgatgagcaatggaatggtttctgcggaagggcctcccaggaacgttggcgccacaaccgaatcaagggaaaaagtgaatgcgagcagtccgccgacgaaaatcgacggggcgagcaacggaagcgtgatcgtccacacgatacgcgcttggcttgcgcccaaatcctgcgccgctttttcatatagtcctgaaatattcgtaagtcgtgcggaaatcgtcacgaatgcgtaagcggaataaatcagcgtttgcgcgataacgacccaagctggtccaagtttgaaaccgagcatgcgggcaacgacgaacaatccgacgacaattacgatttccggcaatgtgatgcgtaggaaaaccaaggaatcgtacgcgcctttcgccttgccgctcattttcgacattccgatcgcgccgagcgaagcgagcaccatggaaagcagcatgaccacaacggcaatgccgatgctggtcaggaacgcactgcgaaaacgttcgctcgacagcgcttcgccgaaccacgtgaaggtggctccgccccaggtgagcagggtcttattggcgttgaacgcatctttgaacaccacaatgatcggcaggaacaggaatacgaaaaccactgcggacatgaccgcggaaaaccaatgttgacggagtttcatcgtactttcctccactgcatgatctgctttccgatgatgatgagcagcactgcgaccatgagcacggacgagagcgccgcaccgcgcggatagttgcctgtggtttggaattcgctggcgatgacattgccaatcatcaacgttttgcttccgccgaggattgccggaatggtgtattcgccaagcgctggaatggccacgagcagacttcccgcgacaatgcctcctccgcaggatggcatgacgatttggaagaatgcctgcgatggtgtcttaccaagatccgcagccgcttccagcaacggctggtcaagctgctcaaacgtggaatatacgggcagaatcatcatcggcagatatgagtagaccatgccgatgatcaccgcagtggtcgaatatcgcagatccgtgccatccgcaacgagatgcatatgtaccaaagcctgcgtgatcacaccgtgcgcacctaacaattcaagccaggcatacgtgcggaccacaaacgacgtccagaagggaataacgatcgcgccgatcatcagcaactgcaattttcctttgcaggacgcgatgaaatatgcgatcggcagtccgagaagcaggcatcccacgaccgtagcaagagtgatgagaatggatctcagcaacgcctgcagataaatggatttgaaaatatctccataattgccgagattccaattcgtggtaaccgtgaatgtggtcagatcaatcttccaaaaggaatagagcacaatgaccacaagcggcactgcgaagcagcatagcgtcaggataccgtcgggaaaggcgagaatcgcaccgacgacaccttcccgtttgcgattgttacgacgtgacatgatacctgcttctttctcaggaattctggatttcctgccaggcagaagcaaccgcctgctggatttcggcgctttgcagggttccgtaaatcgtcttgcctgcggtttccgggttcaacgcctcattcttggtgagggattcatccagggagtccgttaccgactgcatgatccagctggcctgggtcgtgttgatgaaatcggcgtaattggtcttttcaaggtggaaatccatgagcttgtacaccttgtcgaggtttgcggtgcccttgagcggcacccagccatcgaggtatgcaggcatgccttcgctcggcgacacccatccgaccttgtcgccgttggctttggcagatgcgtaatcgtagtcgtaaacgaccgcgatagccgcggaaccgtcatagacctggctggcggcgtccgaatccacaaacgccttgacatattgcttgatatcgagcacggcctgcttggcttcttcaatatcgtccacattggtggtgttcacgtcgtgcccagtggccagcagtgccacatcgatcacgtcggacgaatagctgggcatcaggagcttgcctgagtagcttgccgcctgttcgaacaattccttccaagaagtgggaggattggagacgagttccttgttgtagatgatgccgatcttgccctgttcgaccggaataccccaagggaacgcttcggtatattggctatcgatattcttcagattcgggacctcggaagcgtcgaattcctcgagaagtcccgcgttgtcaagcgtttcggcgactttcatgcctgcaaggctcatatcgtaggagccggaattctgacgaatgatgttgacccatgcggaatctcctccgtcgggagtggaaacctgcttcaacgtgtatccggtttcgtctttgaaggctgaagcctcgttttctccgatccaatcggggtaattcatcatggtgatggtatccgatgcggctttgctttccgcaggagctgaagtcgaaccgccaacttggcatgcgcacagcgagagtgccatggcaaccgcgccagaagcggcgataatgattttcttatgattctttcccatgagtttttcctctcactcaatgtcagattgtctgacaataaagctgaagctatccttgatttgttacgaaagcattaggtctaaaatcgttgcaaattacaagttcgtaacacatctcacagaaacttgctttcaacagacaaatgaaatttttttcaaggagacagagcatgactgtcagactacgttccatttttgatgagatcccaacatatcgtcccggcgaatgcccggacgaagaggaaggcgatcagctgattaaaatgtcatccaacgagctcccctggggaccgtcggaacaactgaaaacctcactgctttccgcatttgagtcaatcaaccgttatccggatttctataagcagaatctttcgatcgaacttgccaaatacacgaatatgcagccggagaacatttttgccgacgatggttccggcactctgctgcaggatctggtacgtctggtcgtcaatgatggggacgaagtggtgttcggctctccgtcttttgccgcatacgatattgacgtgctgctcgcgggcggcgtttcagtgaaagttccactcgacgaatcctggacgtacgatctcgaaggcgtggagcacgccattaccgacaaaacgcgcatggtgctgttatgcaacccgaataatccgacgggaaccttcctcaccaccgcgcaaatccgcgtatttctgcagaaaatcgagaacaccggcatactggtggtaatcgacgaggcatatcgagattttgtcaattgcgaggattgtgaagcatcttcgagtctcgtttcggaattcgacaatgtggtgctgctgcgcaccttctccaaggcgttcggcatggctggattgcgtcttggctacggtcttgcgcgcccggaaatcgtggatgccgtcaacaaagtcgtggccgaattctcggtatcctcactctcccaagcggttggagtcgccatgttgcaagacgagacgatcatggctgatctgaaggcgaaacggaacattatcgtcgcggagcgcgaaaaatatcaagacttccttcgcgagatgaaggtggatttcattccatcccaatccaacttcattatgattccgggcgattccatggaactgttcgctcaattcaggcagcatcagctcatcgttcgtccgtttgacgaccctgctggagtgcgcatcaccgtaggcactcccaagcaaatgctcaaggcgcgggaggtatgggaatgaaatccattgccgtactcacttcaccggaagtgcctcttccagccgaaggttgcgcactacttgatacgctcccctgcacaacaaccgtctgcactcccggtaacgccgcggaagtggtcggcgcatcggaggcctgcttcgtttgggatacggatctgacctcctatatcgagtcccaatgggatgcgtttgcccacctctcgtggatgcatgtcgcagtcaccggagtggattcctttcttttcccgaaactcgtcaattcgaacgttctcttgacgaacgcttcgggaatctacaacgattcgatagcggaattcgtactgttttgcatactgtcacatgccaaacagcgccgtcttctggaatcgcagcaacgcaaccatgaatggcggcatgcaacgagcgcaaccgtcaaagaatccaacgcggttatctacggcgtcggaagcattggacgcacggtcggcaaaacactcaccaagcttggcctgcatgtgcgaggtatcgacccctataccagcgttgcggaaggttttgaatgtatttaccgcaatgccgacatgcgcgaagcggccgcttggtcggattatttcattatctgtgccccactcaccgagcagacccggcatagcgtgaacgctgaaatctttgatgccatgaaagcgagctgccatgtaatcaatgttggacgcggtcccattatcgacgaaacagcccttgtccaagccttgacaagcggttccataggatcggcaagtctcgacgtgttcgaaaccgaacctcttccttcagacaatccgctgtgggagatggaaaacgtacacatcagcccgcatatttccggcgatgcgggagatttcgaacttgcattgattcggcaattcgcggatcttgctgatatgtggtttcacggtcacgactttccatcggccgtggataagaagcgaggttatgcccatacccggcaaaactgaatacgacattattcctgcgtgtgttcgtattcactatttcttgtgtttcacgtgaaactctgtagatgatccggcttggaaagcacttgataatacgccataagaaaaaggaatgcgtgaaatcgtgcagtgcgcggctggttgctttggtggttcgctacagtgggaatatgagtgatttgcgagatgtgattattgtcggatccggccctgccggatataccgcggccatatacttgggccgggctggattcaaaccactggtcatcgcgggtgcgctgaccccaggcgggcagctcgtcaacaccactgaagtggagaattttccaggtttccccgacggcgttatgggaccggaactcatggataatatgcaacgccaggctgagaagttcggcgcggaaatcgtttgggatgatgttgtttccgtgagcaacaatgacgtcaccggcgtgaaaaccgtgagcgtcgatcagggagacgtttttgaaacccatgctttgatcatcgcaaccggatcggaatatcgcaaactcgacatccccggagaggcggaatattccggcaagggagtgtcatattgcgcgacctgcgacggcttcttcttccgagataagccgattattgtggtcggcggcggcgatagcgcattcaccgaggctgattttctttcacgatttggatcgtcggtgacgttgattcatcgtcgttctgaattccgcgcatcgcagattctcgtggaacgcgctcagcagaatccgaagatcaccatcgtcacggattccgtggtggaggaaatcttgggtgacgacaatggagcccaatccgtgaacattcgcaacgtcatcaccggagaaaccagcacgattgccgcaaacggcatttttgtggcgatcggccactcccccgccacagcttttattgacggcattgtgcagcgagatgcgggtggatatattcaggtggacggcgccagcacacgcaccagcactgccggcatttttgcagccggcgactgtgttgatagtatttaccgtcaagcgatcagtgccgccggcatgggctgccgggccgccctcgatgcccaagcctacctccagcagtaacacttcccatcacggtcataccctacaaaaacttgaaaaacgagcggaaggggcggcatattctgttcacgactgtaagcttggccaaacggccttgagtgtgtcgtgaacagaatatgccaccccttccgcggacaccaaaaaacttaagaaatactatttttcggcagtgggcatgagcaggtcgacaatgcgcttcatgtcgtcttcggatttgaacacgatttcgatgcgtccatgctccttggatcccttgatcgacaccttcgtgccgaacctcttttcaagaccgacctgcatcggcgttccggcccacgggttcagcttgttggtcttcgccttcttcggctgatccgattcagcgaccttcatcgacacgatttcctcggtgctgcgtaccgacaacccctcggaaataatgcgcgtcgcaagctgttccatgtcagcttccgtcggtaatccgagcaatgcgcgcgcatgaccggccgacagcaagccggaagcaaccttcttttgtacggtcgcaggcagattcagcagtcgcagagtattggcgatttgcggacgcgacttcgacaccgactttgacaattgcgcctgcgtcaagccaaaatcgtcgatcatctgctgataggcggccgcctcttccaatggattcaacgcaacgcgatgcaggttttccagcaaagcgtcacgcaacatatcgtcgtcggcagtggttttgacaatcgcaggaatcgttttcaaacctgcgatctgcgatgcgcgccaacgacgttcacccataatgagctcgtacatgctatccatgcgcccgtcgaacatattgtgcgactcggcatctttagcggcgttctccttgcgagcagcctcaatctgcgcgagtggacgcttccgtacgacaataggctgcaacacgccgacttctttgatggaatcggcaagctcacgaagatcatcctcatcgaaaatggtacgcggctgatgcaggttcggtccaacatcactcagtcgcaattcaacgagataaccgccctgcaccggcaacagttcaggttcgtcattcttcttatcttcggtcttttttaccgcagcggtttcacgtgaaacactttcctgcttcacttcggaagtggcaacaggactggtggaaccgaagaacatgtcggcaggatgagcagtctcattcaacgtgatggaaggcatactggctcgatggccactccccttcttggtttcacgtgaaacgttcttcttcatgtcatggacggcatcgacggaagccttggcggttgccacggaactcttgaccgcggtcttccccgcggattgcccggcaacagtcgcaccaccggctacgttttctgaaacctttccagcgatcttgttatcagcctttgcacccgcaacagccacagccggttcagtagcggcttccgatttcgccgattctcctggaagagacggaaacagtgcgccgagacccttgcctaaacgtgatttcgtagccatgatcagttctcattccttcttgcatcgatagccttcagcaccgtctgcgagcgacgtgcgatttccaatgcggcctcacaataggcaatcgctcccattcccttgggatcgtaggcgatcacgctttgattgaagcttggagcttccgatattttcaccgttcggggaatcgtggtattcagtacgatagtcggataatgatttttgacttcgtcatgcacttcacggctgagtaacgtcctcttatcgaacatggtgatcagcatggtggaaaccagcagcgacggattgaaatgctcctgcaccagtccgatagtattgatgagctggccgagaccttccagcgcatagtactcagcctggatcggaatcagcatctcatgcaccgcacacatggcattaattaccagcaggccgaggcttggcgggcaatcgataatcacgtagtcgtagtgctcctcgctggtttccagaaactcgtcaaccgcggtcttcagaagcacattacgattttccatgtcggcgacttccagctcggcaccgctcaaatcgatcgaagctggaaccacatcgagcagatcaaaatcaaggcatgtgcgcttgacttcggcgatggtcttcctgccttcgatcacgtcgtacaccgaaggctcccccgacgcatgcggagcgcccaacgcggtcgacgcattgccctgcggatccatatcgatcagcagcaccttggaaccgaactgagccaacgcagcggaaagattcacggccgacgtggttttgccaacgccacccttctggttggcgaccgcgatcaggcgcgtctgctccggctttgggcaaacggccttctgcaaggcgcgatagcgagtcgattcgtcggcaatctgcgaaccaagaggagaatccgatcctccgaaaattcgtttgatggtttccgttgccgattccatcgatgtcaggttatctggtccttcaggtccagtcatacactagccttccttacgatatgcttaacattcaagtttcatcattcgggtggacagaatcagctcatctcacccactgtgcacaaatgtgaatagctgtggatagtcggtggataacttacgttgttcgcaaaaagttatccaccgatctttcgttgctacttcaacatttttccgccgctttttttcgtcgattttccagttgtggacaatgtgaataactcaccgaaatggtggataacttactttttatccaccatgagcacatgggtcgattccaagcccggaccaacctcggcatccaccacccgcggacgaatgccaccgcatttggcgatctctttggaagccttttcgatctcctcttgcgcggaccgccccttcagtgcgaccaaacgtccaccgcgctcaagcaacggcagcgtccaccccgaaagtttggtcataggagccacggcacggcacgtcaccacggcaaacggatgtttcgcctgaataggcttgccatccaaatccagtacaggaccgcgaacggccgttcccctgccgttcttgccgcctttgccattcctggcgcttccattgccacgattgccgccttgagcgccagcagcacccgcaatggcctcgatcatctcattggccctggcacgcaccacggtaacgttattcaactccatatcggccacgcactcgttcagccattcgacacgacgttccatcggctccacaagcgtgaaccggtgatccggcaggcaggcggccgcgacaataccgggaaaaccgccgccactgccgatatcagcaaccgtcttgaactgcttcttagccgtggcttcctttacgaaaggcacaatggcggccgaattcagaatatggcgttcccaaataatgccaacatctcttggcccaatcagaccgcgaggttcgccttcttcggcaagtttcgcatggaaaacacgaagcttgcccaacgcatcccccagcacttcctcaagcatcggcgaatcatcaagttcgtctgtcacatcactcatgggcaccatcctatatcctgctcttcctcattgccggtattccagcaagtacttcccgaccattgacggcaatatcacatgtccggcgcacagccagcatgaagtcactcaaaaaatcgcaataaaaaagcgccaccaaatggtgacgccatgtttcacgtgaaacgagccgaactcaggcctcatcctcgtcttcagcatcttcggcagcggaagccttgagatacaccgtgacgtaacgacgcggttcctcgccgtgggaacgggacttcatgccctcctcacgcaccacatcatgcacgatcttgcgttcgaaggagttcatcggcttgagatcaaccggctcccccgtctcgcgcacctcgtcgatggcgtccagcgcgatgtcgtgcagacgctggcgcttgcgcttcagatagccgtcgacgtccacaatgagatgggaacgctcgccggtcttctgctgcacggccagtcgcgtcagctgctgcagagcgtcaacgacttcgccgttgcgtccgatgagatgcttgatgtccgtatcatcatcggcgacgatttgcacggtagggcgattgttgcgcacgcccatttcgatatcgccttcgtaatcgacgatatcaagcagtccttcaagataatcggcagcgatatcagcttcctcgttgagctgatcgatggtcttttcctcatcttgcgccatagtggttgtactcctttgagcggggtttctattactaaagtcttattgtgtaaagtctaattcctgtttaccacgtcgacaataaacgctgataaaagtggtgtgtcccgcgtttcacgtgaaacacgggacacacttttactcacttctttttctttttacggctcggctgctgacgctggtagccgctcttttccttcacttcggcagcttccttggccttctgcagcgcctcttcctcgagggatggcagaccggccttggctcggcgggcgttctcatgaacatgatcacgcttttccttcgcttcggcggccggagatcccggagtcgggaagacgtggatctgccagatggaacgcaacagattgcagatgttgttggtgagccagtacaccagcacagcgaacggcatggcaataccggagaaaatgtacatgatcgggaacatccacaacatcatcttctgcatcatttcggtctgcttgtttgccgcagactgagccatgttacgcttcatgctgttgtactgcatgaaccacaggcagaagcacatcaatgcaacgaagatggcgataactactttgccatgcacggcggcggtcgtgaagttatcagccacgttcacaccgaacactgtggtggacgtgaactgcttggctgtggcgatgtcgaaagcgccaagaccctgtccgtccctgaatttgccgcgtgcgatgtacggaatggctgacagcgtatagaacatgcacatgaatacgggaccctgcacgaacatagggagcatggaagtgcagccacccatcgggttcgcatcattgtcctggtagagcttcatcatctcgcgctgcatggcttccttgctggcgggatcgttcttgcccttgtatttgttttggatacgctgcatctttggctgcaggacggtcatctgggcctgcatcttgcgcatacccttcatggacttgtagaacagcggaaaaacgcatgcctggaccacaagtactaggaatacgatggacatgacccacgagaaaccgatctcgttcatgcccagcatcaccaggaacttatggaatacggccatgatctgcgtcatgagccactcgacgggatacaggagcttatacagccagccccagaaaccgctgtcgaggaggaattgattttgattcattacaggccagtctccttatcgcctataggtttttctacgttcagaggcgtgagccgaggttcctcgtgtgccttcgaccacgaacatctgtaaaacaaggaataaagctgcggaacgtcgtcaattcccccacggttccactgattgcagcgaagaaggcgcaataacgcaagaaggccacccttaaggcggccaaatcgttcaatcgcctgaatcgcgtaattggaacaacttggataatatctgcagcaaggcgcggtattcgcggaaatatgacgttggtaccagcgaatggcacgaatcatccaatttccgttacgaccggcgttcattaccgacgcacggccttacgattcaccgcttcaaaacatgctgcgatctgctgctccaacgatagaaaatcggcatgcgcagcacttggcttggcacgcaacacgatatcgcaggattcaggtaaggcagattcgtactttcgtgcaagcacgcggaaacgacgcttgacggcactacgcgtcacagcgttgccgacagccttggaaacggccaaaccgacacgtcggccccgcatcgccgcagaatcgtcgataatggcatcgtcgtgcaccaaataatgcacgacgatgtcttctcgcgataccctacgacggcgtttgagcaccgcgacgaaatcgcgatggcttttcagccgttccaccgctctatgccgttaaatcaggcagcgagggacttgcggcccttggcgcggcgacggttgatcagagcgcggcctgcgcgggtgcgcatgcgctgacggaaaccgtgcttcatgtgacgacgacggttgttcggctggaatgtcctcttcataattaatgctcccggtgttttttgccatgccaaggcacggctcctcatgagtcaagctctaccaagttactctgacccctgaacagagatgaatacgcatatcaaatccttcacattttcatggggattctccccacaaaacaatccacagaaacgttgatatgtcgccaaactccccacaaaagttatccacaaactacaatgatgttattcacaattcagtcttttcaacacgcttaccggtggataacttggggaaaagagagtacaaataaacagttgcacacttggaaaaagtctgtcgagaaaggggaatcc
